(19) United States
(12) Patent Application Publication
(10) Pub. No.: US 2021/0371497 A1
(43) Pub. Date: Dec. 2, 2021

(54) ARTIFICIAL SYNAPSES

(71) Applicant: DIADEM BIOTHERAPEUTICS INC., Torrance, CA (US)

(72) Inventors: Mickey Pentecost, West Hollywood, CA (US); Wojciech Bartkowski, La Crescenta, CA (US)

(73) Assignee: DIADEM BIOTHERAPEUTICS INC., Torrance, CA (US)

(21) Appl. No.: 17/377,520

(22) Filed: Jul. 16, 2021

Related U.S. Application Data
(63) Continuation of application No. PCT/US2021/016949, filed on Feb. 5, 2021.
(60) Provisional application No. 62/970,374, filed on Feb. 5, 2020.

(51) Int. Cl. C07K 14/705; C12N 9/14; A61P 37/06; A61P 27/02

(52) U.S. Cl. CPC C07K 14/70532; C07K 14/705; C07K 14/70521; C07K 2319/30; C12N 9/14; A61P 37/06; A61P 27/02; C07K 14/70596

(57) ABSTRACT

Described herein are compositions and techniques related to generation and therapeutic application of artificial synapses. Artificial synapses are engineered extracellular vesicles, including exosomes, which incorporate sticky binders on their surface to anchor signaling domains against biological targets, such as receptors. These engineered additives can be organized in genetic vector constructs, expressed in mammalian cells, wherein the sticky binders attach to extracellular vesicles such as exosomes, thereby presenting their joined signaling domains which are rapidly taken up by recipient cells. Artificial synapses adopt the hallmark biophysical and biochemical features of extracellular vesicles, allowing for rapid deployment and scale-up. Importantly, this strategy can allow for kinetically favorable signal generation and signal propagation. This includes, for example, increasing density of agonist presentation to support receptor clustering—an onerous barrier for traditional receptor targeting strategies.

### CROSS-REFERENCE TO RELATED APPLICATIONS

[0001] This application is a continuation of International Application No. PCT/US2021/016949, filed Feb. 5, 2021, which designated the U.S., and also claims the benefit of priority under 35 U.S.C. § 119(e) of U.S. Provisional Application No. 62/970,374, filed Feb. 5, 2020, the contents of both of which are incorporated herein by reference in their entirety.

### FIELD OF THE INVENTION

[0002] This invention relates to the generation of artificial synapses or extracellular vesicles, including features of extracellular vesicles engineered to deliver signaling, for therapeutic use, including treatment of immune diseases and cancer.

### BACKGROUND

[0003] Extracellular vesicles (EVs) play a critical role in intercellular communication by transferring microRNAs, lipids, and proteins to neighboring cells. The delivery of encapsulated molecules within EVs is a highly promising strategy as a therapeutic platform in many contexts, exploiting the unique biophysical and biochemical characteristics of extracellular vesicles (EVs). However, there remains a great need in the art for a flexible and dynamic platform, where specific biological signals can be reliably targeted without off-target effects and that provide a robust cellular response to achieve a therapeutic effect, such as modulating inflammation.

### SUMMARY

[0004] The compositions and methods provided herein are based, in part, on the discovery that extracellular vesicles can be used to express engineered fusion polypeptides that can modulate biological signal generation. These engineered vesicles, also termed artificial synapses, adopt the hallmark biophysical and biochemical features of extracellular vesicles, but are further engineered with vesicle targeting domains (e.g., sticky binders) and signaling domains, optionally joined by a linker with specific functions. The fusion polypeptides provided herein are designed and produced as nucleic acid constructs (e.g., vectors) and expressed in cells, such as mammalian cells. In particular, the vesicle targeting domain of each fusion polypeptide anchors the polypeptide to the extracellular vesicle lipid membrane, thereby presenting the signaling domain(s) of the polypeptide. The signaling domains on or within the vesicle membrane can make contact with recipient cells via target polypeptides (e.g., receptors on the extracellular surface of the recipient cell). Importantly, this strategy can allow for kinetically favorable signal generation and signal propagation. This includes, for example, increasing density of agonist presentation to support receptor clustering of a target receptor located on a target cell—an onerous barrier for traditional receptor targeting strategies.

[0005] This strategy was applied to alter immune checkpoint signaling, by engineering artificial synapses through genetic constructs with lipid binding glycosylphosphatidylinositol (GPI) sticky binders joined with programmed death-ligand 1 (PD-L1) signaling domain, e.g., human programmed death-ligand 1 (hPD-L1), expressed in cells and capable of attachment to exosomes. Isolation, purification, and analysis of artificial synapses revealed a high density of signaling domains of the hPD-L1-GPI fusion polypeptide. The hPD-L1 artificial synapse exosomes further demonstrated enhanced agonist signaling than soluble PD-L1 ligand alone, supporting receptor clustering on a target cell. When applied to a model of experimental autoimmune uveoretinitis (EAU), a statistically significant reduction in EAU symptoms was observed.

[0006] Thus, in one aspect, provided herein is an engineered extracellular vesicle or artificial vesicle comprising: at least one fusion polypeptide comprising: at least one protein of interest (POI) domain; and at least one vesicle targeting domain. In some embodiments of any of the aspects, the engineered extracellular vesicle is an exosome. In some embodiments, of any of the aspects, the fusion protein further comprises at least one linker. In some embodiments of any of the aspects, the POI domain can substantially bind to a target polypeptide.

[0007] In another aspect, provided herein is an engineered extracellular vesicle comprising: at least one fusion polypeptide comprising:
[0008] (i) at least one protein of interest (POI) domain or a fragment thereof; and
[0009] (ii) at least one vesicle targeting domain,
[0010] wherein the POI domain is in an extracellular position relative to a lipid membrane of the extracellular vesicle.

[0011] In another aspect, provided herein is an engineered extracellular vesicle comprising:

[0012] (a) a first fusion polypeptide comprising:
[0013] (i) at least one protein of interest (POI) domain or a fragment thereof; and
[0014] (ii) at least one vesicle targeting domain,

[0015] wherein the at least one POI domain is in an extracellular position relative to a lipid membrane of the extracellular vesicle,

[0016] (b) a second fusion polypeptide comprising:
[0017] (i) at least one protein of interest (POI) domain or a fragment thereof; and
[0018] (ii) at least one vesicle targeting domain,
   wherein the POI domain is in an extracellular position relative to a lipid membrane of the extracellular vesicle,
   and wherein the at least one vesicle targeting domain is within a lipid membrane of the extracellular vesicle.

[0019] In another aspect, provided herein is an extracellular vesicle composition comprising:

a plurality of artificial synapses,
wherein each artificial synapse comprises (i) an extracellular vesicle; (ii) one or more sticky binders; and (iii) one or more signaling domains.

[0020] In another aspect, provided herein is a composition comprising a plurality of the engineered extracellular vesicles provided herein.

[0021] In another aspect, provided herein is a composition comprising two or more of the engineered extracellular vesicles provided herein.

[0022] In another aspect, provided herein is a composition comprising three or more of the engineered extracellular vesicles provided herein.

[0023] In another aspect, provided herein is a method of producing the engineered extracellular vesicle or the compositions provided herein, comprising:
[0024] (a) providing a population of cells expressing a vector construct encoding one or more sticky binder and one or more signaling domains; and
[0025] (b) isolating a plurality of artificial synapses from the population of cells.

[0026] In another aspect, provided herein is a method of producing the engineered extracellular vesicle or the compositions provided herein, comprising:
[0027] (a) providing a population of cells expressing a vector construct encoding one or more sticky binder and one or more signaling domains; and
[0028] (b) isolating a plurality of artificial synapses from the population of cells; and
[0029] (c) purifying the plurality of artificial synapses from the population of cells.

[0030] In another aspect, provided herein is a method of modulating inflammation in a subject, the method comprising:

[0031] administering a composition comprising a plurality of engineered extracellular vesicles to a subject in need thereof,

[0032] wherein the engineered extracellular vesicles comprise at least one fusion polypeptide comprising:
[0033] (i) at least one protein of interest (POI) domain or a fragment thereof; and
[0034] (ii) at least one vesicle targeting domain.

[0035] In another aspect, provided herein is a use of a composition or engineered extracellular vesicle provided herein for the treatment of an inflammatory disease or condition.

[0036] In another aspect, provided herein is a use of a composition or engineered extracellular vesicle provided herein for the treatment of an autoimmune disease or condition.

[0037] In another aspect, provided herein is a use of a composition or engineered extracellular vesicle provided herein for the treatment of cancer.

[0038] In one embodiment of any of the aspects, the engineered extracellular vesicle is an exosome.

[0039] In another embodiment of any of the aspects, the protein of interest (POI) domain or a fragment thereof is a N-terminal domain of the fusion polypeptide. In another embodiment of any of the aspects, the POI domain is selected from the group consisting of: Table 1. In another embodiment of any of the aspects, the POI domain is PD-L1 or a fragment thereof. In another embodiment of any of the aspects, the POI domain is PD-L2 or a fragment thereof. In another embodiment of any of the aspects, the POI domain is FGL1 or a fragment thereof. In another embodiment of any of the aspects, the POI domain is 4-1BBL or a fragment thereof. In another embodiment of any of the aspects, the POI domain is CTLA-4 or a fragment thereof. In another embodiment of any of the aspects, the protein of interest (POI) domain is HVEM or a fragment thereof.

[0040] In another embodiment of any of the aspects, the vesicle targeting domain is a C-terminal domain of the fusion polypeptide. In another embodiment of any of the aspects, the vesicle targeting domain is in a luminal position relative to the lipid membrane of the extracellular vesicle. In another embodiment of any of the aspects, the vesicle targeting domain in an exterior position relative to the lipid membrane of the extracellular vesicle. In another embodiment of any of the aspects, the vesicle targeting domain is selected from the group consisting of: Table 3. In another embodiment of any of the aspects, the vesicle targeting domain is selected from the group consisting of: a Glycosylphosphatidylinositol (GPI) anchor, a fatty acetylation site, and a prenylation site. In another embodiment of any of the aspects, the vesicle targeting domain is C1C2. In another embodiment of any of the aspects, the vesicle targeting domain is a GPI anchor.

[0041] In another embodiment of any of the aspects, the fusion polypeptide comprises at least two POI domains and/or at least two exosome targeting domains.

[0042] In another embodiment of any of the aspects, the POI domain substantially binds to one or more of a target polypeptide. In another embodiment of any of the aspects, the target polypeptide is selected from the group consisting of: Table 2.

[0043] In another embodiment of any of the aspects, the fusion polypeptide further comprises a peptide linker. In another embodiment of any of the aspects, the fusion polypeptide further comprises a fragment crystallizable region (Fc) domain. In another embodiment of any of the aspects, the linker is in an exterior position relative to the lipid membrane of the extracellular vesicle. In another embodiment of any of the aspects, the linker is a transmembrane linker. In another embodiment of any of the aspects, the linker is in a luminal position relative to the lipid membrane of the extracellular vesicle.

[0044] In another embodiment of any of the aspects, the engineered extracellular vesicle does not comprise an endogenous POI polypeptide.

[0045] In another embodiment of any of the aspects, the composition further comprises a pharmaceutically acceptable carrier.

[0046] In another embodiment of any of the aspects, the one or more sticky binders or the vesicle targeting domain is selected from the group consisting of: a GPI anchor, a fatty acetylation site, and a prenylation site.

[0047] In another embodiment of any of the aspects, the signaling domain or the protein of interest comprises one or more of: PD-L1, PD-L2, CTLA-4 (CD152), 4-1BBL (CD137L), HVEM (CD270), FGL1, OX-2 (CD200), Galectin-9, PVR (CD155), Nectin-2 (CD112) isoform alpha, Nectin-2 (CD112) isoform beta, Nectin-2 (CD112) isoform delta, IL-10, TSG-6, B7-H3 (CD276), B7-H4 (VTCN1), B7-H5 (VISTA), B7-H7 (HHLA2), BTNL1, VSIG8, VSIG3 (IGSF11), VSIG4, TIM-3 (HAVCR2), TIM-4 (TIMD4), CEACAM1, BTN3A1, BTN3A2, BTN2A1, BTNL8, BTN2A2, BTN1A1, TIGIT, CD27L (CD70), CD30L (CD153), GITRL, CD40L (CD154), LIGHT (CD258), TL1, CD80, CD86, LFA-3 (CD58), SLAM (CD150), CD40, CD28, CD28H, CD2, LFA-3 (CD58), CD48, CD226, DR3, DcR3, FasL, TIM-1 (CD365), PD-1, or active fragment thereof.

[0048] In another embodiment of any of the aspects, the isolating is via size exclusion chromatography. In another embodiment of any of the aspects, the purifying is via multimodal chromatography. In another embodiment of any of the aspects, the method further comprises performing an assay for POI binding to a target polypeptide.

[0049] In another embodiment of any of the aspects, the vector construct further encodes a promoter. In another embodiment of any of the aspects, the promoter is a tissue-specific promoter or an inducible promotor.

[0050] In one embodiment of any of the aspects, the method further comprises selecting a subject that has or is suspected of having an autoimmune disease or an inflammatory disease or condition. In another embodiment of any of the aspects, the inflammatory disease and/or condition is acute. In another embodiment of any of the aspects, the inflammatory related disease and/or condition is chronic.

[0051] In another embodiment of any of the aspects, administering the composition provided herein comprises injection, topical administration, or inhalation.

### A BRIEF DESCRIPTION OF THE DRAWINGS

[0052] FIG. 1 shows construct representation of fusion polypeptides for labeling an exosome surface with Type I membrane proteins.

[0053] FIG. 2A shows nucleic acid and translated protein sequences of full-length Phosphatidylserine binding: Lactadherin (MFGE8) C1C2. Underlined nucleic acid sequence highlights the sequence translated to the C1C2 protein. Bold and underlined text highlights the C1C2 domain used to anchor signaling domains of interest (i.e. PD-L1 extracellular domain) onto the surface of the Inventors' artificial synapses. FIG. 2B shows nucleic acid and translated protein sequences of full length CD55 (DAF) Glycosylphosphatidylinositol (GPI) anchor. Bold and underlined text highlights the GPI anchor domain used to anchor signaling domains of interest (i.e. PD-L1 extracellular domain) onto the surface of the Inventors' artificial synapses engineered from exosomes.

[0054] FIG. 3 demonstrates the nucleic acid and translated protein sequence for the Fc linker used in genetically engineered constructs is shown in bold and underlined.

[0055] FIG. 4A demonstrates nucleic acid and translated protein sequence of human PD-L1 (CD274). Bold and underlined sequence highlights the PD-L1 extracellular domain used in the Inventors' artificial synapses engineered from exosomes. FIG. 4B demonstrates nucleic acid and protein sequence of human PD-L2. Bold and underlined sequence highlights the PD-L2 extracellular domain used in the Inventors' artificial synapses engineered from exosomes. FIG. 4C shows mRNA and protein sequence of human CTLA-4 (CD152). Bold and underlined sequence highlights the CTLA-4 extracellular domain used in the Inventors' artificial synapses.

[0056] FIG. 5A shows an exemplary embodiment of pcDNA5-FRT cloning vector with a gene sequence coding for a fusion polypeptide inserted into a multiple cloning site. FIG. 5B shows an exemplary embodiment of the Gateway® destination vector pEF5-FRT-V5-DEST with a gene sequence coding for a fusion polypeptide inserted into a multiple cloning site. The vectors were used for constitutive high-level expression of fusion polypeptide described herein in mammalian cells. FIG. 5C shows the nucleic acid and protein sequence for the hCTLA4-Fc-GPI fusion polypeptide wherein the text for the signaling domain is bolded, Fc linker is underlined, and sticky binder is italicized. FIG. 5D shows the nucleic acid and protein sequence for the hPDL1-GPI-P2A-hHVEM-GPI fusion polypeptide wherein the text for the signaling domain hPDL1 and hHVEM are bolded, P2A sequence is underlined, and sticky binder GPI is italicized. With P2A included, a self-cleaving peptide sequence, artificial synapses with this feature will have both hPDL1-GPI and hHVEM-GPI loaded onto the surface. FIG. 5E shows the nucleic acid and protein sequence for the hPDL1-GPI-P2A-hFGL1-GPI fusion polypeptide wherein the text for the signaling domain hPDL1 and hFGL1 are bolded, P2A sequence is underlined, and sticky binder GPI is italicized. With P2A included, a self-cleaving peptide sequence, artificial synapses with this feature will have both hPDL1-GPI and FGL1-GPI loaded onto the surface. FIG. 5F shows the nucleic acid and protein sequence for the hPDL1-GPI fusion polypeptide wherein the text for the signaling domain hPDL1 is bolded and sticky binder GPI is italicized. FIG. 5G shows the nucleic acid and protein sequence for the hPDL1-Fc-GPI fusion polypeptide wherein the text for the signaling domain hPDL1 is bolded, Fc is underlined, and sticky binder GPI is italicized. FIG. 5H shows the nucleic acid and protein sequence for the hPDL2-Fc-GPI fusion polypeptide wherein the text for the signaling domain hPDL2 is bolded, Fc is underlined, and sticky binder GPI is italicized. FIG. 5I shows the nucleic acid and protein sequence for the hPDL1-C1C2 fusion polypeptide wherein the text for the signaling domain hPDL1 is bolded and sticky binder C1C2 is italicized. FIG. 5J shows the nucleic acid and protein sequence for the hPDL2-C1C2 fusion polypeptide wherein the text for the signaling domain hPDL2 is bolded and sticky binder C1C2 is italicized. FIG. 5K shows the nucleic acid and protein sequence for the 4F2-h41BBL fusion polypeptide wherein the text for the signaling domain h41BBL is bolded and sticky binder 4F2 is italicized. FIG. 5L shows the nucleic acid and protein sequence for the hPDL1-4Fc-GPI fusion polypeptide wherein the text for the signaling domain hPDL1 is bolded, 4Fc is underlined, and sticky binder GPI is italicized. FIG. 5M shows the nucleic acid and protein sequence for the Myr-NanoLuc Luciferase fusion polypeptide wherein the text for the signaling domain NanoLuc Luciferase is bolded, and sticky binder Myr is italicized. FIG. 5N shows the nucleic acid and protein sequence for the Myr-mScarlet fusion polypeptide wherein the text for the signaling domain mScarlet is bolded, and sticky binder Myr is italicized. FIG. 5O shows the nucleic acid and protein sequence for the secreted isoform of hPDL1 (SecPDL1) fusion polypeptide hSecPDL1-GPI wherein the text for the signaling domain hSecPDL1 is bolded and sticky binder GPI is italicized. FIG. 5P shows the nucleic acid and protein sequence for the Tfr2-h41BBL fusion polypeptide wherein the text for the signaling domain h41BBL is bolded and sticky binder Tfr2 is italicized. FIG. 5Q shows the nucleic acid and protein sequence for the CD9tm3-h41BBL fusion polypeptide wherein the text for the signaling domain h41BBL is bolded and sticky binder CD9tm3 is italicized. FIG. 5R shows the nucleic acid and protein sequence for the Myr/Palm-4F2-h41BBL fusion polypeptide wherein the text for the signaling domain h41BBL is bolded, sticky binder Myr/Palm is underlined, and sticky binder 4F2 is italicized. FIG. 5S shows the nucleic acid and protein sequence for the Myr/Palm-Link-h41BBL fusion polypeptide wherein the text for the signaling domain h41BBL is bolded, sticky binder Myr/Palm is italicized and underlined, and sticky binder Link (in this embodiment a GSSG linker) is in regular text (not underlined and not italicized). FIG. 5T shows the nucleic acid and protein sequence for the hPDL1-Link-GPI fusion polypeptide wherein the text for the signaling domain hPDL1 is bolded, Link is underlined (in this embodiment a GSSG linker), and sticky binder GPI is italicized. FIG. 5U shows the nucleic acid and protein sequence for the secreted isoform of hPDL1 (SecPDL1) fusion polypeptide hSecPDL1-CD9tm2 wherein the text for the signaling domain hSecPDL1 is bolded and sticky binder CD9tm2 is italicized. FIG. 5V shows the nucleic acid and protein sequence for the secreted isoform of hPDL1 (SecPDL1) fusion polypeptide hSecPDL1-CD9tm2-KRAS wherein the text for the signaling domain hSecPDL1 is bolded, sticky binder CD9tm2 is italicized, and sticky binder KRAS is italicized and underlined. FIG. 5W shows the nucleic acid and protein sequence for the secreted isoform of hPDL1 (SecPDL1) fusion polypeptide hSecPDL1-CD9tm4 wherein the text for the signaling domain hSecPDL1 is bolded and sticky binder CD9tm4 is italicized. FIG. 5X shows the nucleic acid and protein sequence for the secreted isoform of hPDL1 (SecPDL1) fusion polypeptide hSecPDL1-CD81 wherein the text for the signaling domain hSecPDL1 is bolded and sticky binder CD81 is italicized. FIG. 5Y shows the nucleic acid and protein sequence for the hCD200-Fc-GPI fusion polypeptide wherein the text for the signaling domain hCD200 is bolded, Fc is underlined, and sticky binder GPI is italicized, a spacer sequence domain (regular text, not underlined and not italicized) separates hCD200 sequence from the Fc domain, a spacer sequence domain (regular text, not underlined and not italicized) separates Fc sequence from the GPI. FIG. 5Z shows the nucleic acid and protein sequence for the hFGL1-GPI fusion polypeptide wherein the text for the signaling domain hFGL1 is bolded, and sticky binder GPI is italicized. FIG. 5AA shows the nucleic acid and protein sequence for the hGal9-Fc-GPI fusion polypeptide wherein the text for the signaling domain hGal9 is bolded, Fc is underlined, and sticky binder GPI is italicized. FIG. 5BB shows the nucleic acid and protein sequence for the hCD200-GPI fusion polypeptide wherein the text for the signaling domain hCD200 is bolded, and sticky binder GPI is italicized. FIG. 5CC shows the nucleic acid and protein sequence for the hGal9-GPI fusion polypeptide wherein the text for the signaling domain hGal9 is bolded, and sticky binder GPI is italicized. FIG. 5DD shows the nucleic acid and protein sequence for the hHVEM-GPI fusion polypeptide wherein the text for the signaling domain hHVEM is bolded, and sticky binder GPI is italicized. FIG. 5EE shows the nucleic acid and protein sequence for the hPDL2-GPI fusion polypeptide wherein the text for the signaling domain hPDL2 is bolded, and sticky binder GPI is italicized. FIG. 5FF shows the nucleic acid and protein sequence for the hTSG6-GPI fusion polypeptide wherein the text for the signaling domain hTSG6 is bolded, and sticky binder GPI is italicized. FIG. 5GG shows the nucleic acid and protein sequence for the hHVEM-Fc-GPI fusion polypeptide wherein the text for the signaling domain hHVEM is bolded, Fc is underlined, and sticky binder GPI is italicized. FIG. 5HH shows the nucleic acid and protein sequence for the mCTLA4-Fc-GPI fusion polypeptide wherein the text for the signaling domain mCTLA4 is bolded, Fc is underlined, and sticky binder GPI is italicized. FIG. 5II shows the nucleic acid and protein sequence for the mPDL1-C1C2 fusion polypeptide wherein the text for the signaling domain mPDL1 is bolded and sticky binder C1C2 is italicized. FIG. 5JJ shows the nucleic acid and protein sequence for the mPDL1-Fc-GPI fusion polypeptide wherein the text for the signaling domain mPDL1 is bolded, Fc is underlined, and sticky binder GPI is italicized. FIG. 5KK shows the nucleic acid and protein sequence for the mPDL1-GPI fusion polypeptide wherein the text for the signaling domain mPDL1 is bolded and sticky binder GPI is italicized. FIG. 5LL shows the nucleic acid and protein sequence for the mPDL2-C1C2 fusion polypeptide wherein the text for the signaling domain mPDL2 is bolded and sticky binder C1C2 is italicized. FIG. 5MM shows the nucleic acid and protein sequence for the mPDL2-Fc-GPI fusion polypeptide wherein the text for the signaling domain mPDL2 is bolded, Fc is underlined, and sticky binder GPI is italicized. FIG. 5NN shows the nucleic acid and protein sequence for the mPDL1-mFc-GPI fusion polypeptide wherein the text for the signaling domain mPDL2 is bolded, mFc is underlined, and sticky binder GPI is italicized. FIG. 5OO shows the nucleic acid and protein sequence for the mPDL2-GPI fusion polypeptide wherein the text for the signaling domain mPDL2 is bolded and sticky binder GPI is italicized. FIG. 5PP shows the nucleic acid and protein sequence for the mPDL1-GPI-P2A-mHVEM-GPI fusion polypeptide wherein the text for the signaling domain mPDL1 and mHVEM are bolded, P2A sequence is underlined, and sticky binder GPI is italicized. With P2A included, a self-cleaving peptide sequence, artificial synapses with this feature will have both mPDL1-GPI and mHVEM-GPI loaded onto the surface. FIG. 5QQ shows the nucleic acid and protein sequence for the hPDL1-ADAM10 fusion polypeptide wherein the text for the signaling domain mPDL1 is bolded and sticky binder ADAM10 is italicized. FIG. 5RR shows the nucleic acid and protein sequence for the hPDL1-4Fc-CD9tm2 fusion polypeptide wherein the text for the signaling domain hPDL1 is bolded, 4Fc is underlined, and sticky binder CD9tm2 is italicized. FIG. 5SS shows the nucleic acid and protein sequence for the fusion polypeptide hPDL1-4Fc-CD9tm2-KRAS wherein the text for the signaling domain hPDL1 is bolded, sticky binder 4Fc is underlined, sticky binder CD9tm2 is italicized, and sticky binder KRAS is italicized and underlined. FIG. 5TT shows the nucleic acid and protein sequence for the hPDL1-Fc-CD9tm2 fusion polypeptide wherein the text for the signaling domain hPDL1 is bolded, Fc is underlined, and sticky binder CD9tm2 is italicized. FIG. 5UU shows the nucleic acid and protein sequence for the fusion polypeptide hPDL1-Fc-CD9tm2-KRAS wherein the text for the signaling domain hPDL1 is bolded, sticky binder Fc is underlined, sticky binder CD9tm2 is italicized, and sticky binder KRAS is italicized and underlined. FIG. 5VV shows the nucleic acid and protein sequence for the mPDL1-mFc-CD9tm2 fusion polypeptide wherein the text for the signaling domain mouse PDL1 (mPDL1) is bolded, mouse mFc (mFc) is underlined, and sticky binder CD9tm2 is italicized. FIG. 5WW shows the nucleic acid and protein sequence for the fusion polypeptide mPDL1-mFc-CD9tm2-KRAS wherein the text for the signaling domain mPDL1 is bolded, sticky binder mFc is underlined, sticky binder CD9tm2 is italicized, and sticky binder KRAS is italicized and underlined. Wherein mPDL1 and mFc are mouse PDL1 and mouse Fc, respectively.

[0057] FIG. 6 shows hPD-L1-Fc-GPI artificial synapse purification via a multimodal resin marketed for exosome purification. Large MW artificial synapses elute in the first fraction as shown by the high hPD-L1 concentration and artificial synapse quantity (2.26E9 synapses/ml) in elution 1. Clean in place (CIP) fractions show bound and eliminated proteins from the Inventors' artificial synapse elution.

[0058] FIG. 7 shows hPDL1-Fc-GPI exosome purification via size exclusion chromatography using a resin marketed for exosome purification. Artificial synapses engineered from exosomes eluted from via a multimodal resin may be further purified via size exclusion chromatography using a resin marketed for exosome purification as shown here. Using a size exclusion chromatography, artificial synapses elute in fractions 7-9. Total protein (determined by qBit) and hPD-L1 ng/ml (determined by ELISA) of each fraction is shown in the graph. Bars show exosome number per ml (i.e., 1E10 exosomes/ml etc.). Fractions 7-9 contain >99% purified artificial synapses. Fractions 7-9 are pooled and may be concentrated using a filtration device, for example a 10K MWCO Amicon centrifugal filter. Final purified product may be filtered through a low protein binding filter, for example a 0.2 μm or 0.45 μm PES filter.

[0059] FIG. 8 shows hPD-L1 Expression on exosomes, quantity and hPD-L1 concentration was determined in size exclusion chromatography fractions 7-9. Knowing the molecular weight of engineered hPD-L1, the Inventors can determine the number of hPD-L1 molecules per exosome to be approximately between 12 and 40 hPD-L1/exosome. This value is consistent between different purification runs and constructs.

[0060] FIG. 9 shows the purification of hPD-L2-Fc-GPI artificial synapses engineered from exosomes via multimodal resin marketed for exosome purification. This graph shows Abs 280 of fractions and quantity of hPDL2 in indicated fractions. Exosomes eluted in Elution 1. Clean in place (CIP) fractions show bound and eliminated proteins from the Inventors' artificial synapse elution.

[0061] FIG. 10 shows purification of hPD-L2-Fc-GPI labeled exosomes via size exclusion column as shown here using size exclusion resin marketed for exosome purification. Fractions containing large molecular weight exosomes (Fractions 7-9) showed high hPD-L2 concentration indicating that the purified exosomes contain hPD-L2-Fc-GPI. Total protein (determined by qBit) and hPD-L1 ng/ml (determined by ELISA) of each fraction is shown in the graph. Lower molecular weight unbound hPD-L2-Fc-GPI eluted at later fractions.

[0062] FIG. 11 shows hCTLA4-Fc-GPI exosome purification via size exclusion column as shown here using size exclusion resin marketed for exosome purification. Using size exclusion chromatography, exosomes elute in fractions 7-9. Total protein (determined by qBit) and hCTLA4 ng/ml (determined by ELISA) of each fraction is shown in the graph. Fractions 7-9 are pooled and contain >99% purified exosomes. Pooled exosome fractions may then be concentrated using a filtration device, for example a 10K MWCO Amicon centrifugal filter. Final purified product may be filtered through a low protein binding filter, for example a 0.2 μm or 0.45 um PES filter. Knowing the molecular weight of engineered hCTLA-4, the Inventors can determine the number of hCTLA-4 molecules per exosome to be approximately 233 hCTLA-4/exosome.

[0063] FIG. 12A shows PD-1 Signaling Bioassay Method. The Inventors established a method to validate that PD-L1 and PD-L2 artificial synapses engineered from exosomes can bind to cells expressing PD-1 ligand. To perform this validation method, the Inventors modified the PathHunter PD-1 Signaling Bioassay from DiscoverX Briefly, the PathHunter PD-1 Signaling Bioassay relies on the well-established PathHunter Enzyme Fragment Complementation (EFC) technology to interrogate receptor activity. EFC consists of a split β-galactosidase (β-gal) enzyme: the Enzyme Donor (ED) and Enzyme Acceptor (EA) fragments which independently have no β-gal activity. However, when forced to complement they form an active β-gal enzyme that will hydrolyze substrate to produce a chemiluminescent signal. The PathHunter PD-1 Signaling Bioassay consists of human cells engineered to stably express an ED-tagged PD-1 receptor, while EA is fused to the phosphotyrosine-binding SH2 domain of the intracellular signaling protein, SHP1. Ligand or antibody-induced activation of the receptor results in phosphorylation of the receptor's cytosolic tail. Ligand engagement, through addition of ligand-presenting artificial synapses engineered from exosomes, results in phosphorylation of PD-1, leading to the recruitment of SHP1-EA. This forces complementation of the EFC components to create an active β-gal enzyme. This active enzyme hydrolyzes substrate to create chemiluminescence as a measure of receptor activity. Addition of an antagonist (e.g., antibody to PD-L1) blocks PD-1 signaling, and will prevent complementation, resulting in a loss of signal. FIG. 12B shows that the Inventors obtained approximately 10,000× higher increase in Relative Light Units (RLU) in Jurkat signaling cells treated with PD-L1 or PD-L2 labeled artificial synapses when compared to soluble PD-L1-Fc or PD-L2-Fc ligand, respectively. Meaning, it took 10,000× less ug/ml of PD-L1 or PD-L2 on artificial synapses than solubilized PD-L1-Fc or PD-L2 ligand to achieve the same RLU signaling. Shown is a dose-response curve for the PD-L1 and PD-L2 artificial synapses engineered from exosomes vs soluble PD-L1 and PD-L2 signaling bioassay.

[0064] FIG. 13A-13C shows experimental EAU outline Test Agent A—unmodified exosomes, Test Agent B—mPDL1-Fc-GPI artificial synapses engineered from exosomes 40 ug/ml, Test Agent C—mPDL1-Fc-GPI artificial synapses engineered from exosomes 400 ug/ml, IRBP—interphotoreceptor retinoid-binding protein (IRBP) peptide, BID—Bis in die (2× daily) p.o.—Per os (orally) (FIG. 13B) EAU symptoms appear at day 6. 1st intravitreal injection and 2nd intravenous injections are performed on Day 6. There is a statistically significant initial reduction in EAU in mouse PD-L1 (mPD-L1) artificial synapses engineered from exosomes treated rats via either the intravitreal and intravenous delivery modes. 2nd intravitreal and 3rd intravenous injections are performed on Day 12. There appears to be a more rapid rate of resolution in the 1× intravitreal and intravenous groups. (FIG. 13C) Weight of rats was monitored throughout the study. 3rd intravitreal and 4th intravenous injections are performed on Day 16. There does not appear to be any significant change in EAU in any of the test groups. The aforementioned results provide proof of principle of successfully treating an autoimmune condition (i.e. EAU) with human cell derived artificial synapses with PD-L1.

[0065] FIG. 14 shows 2 types of ligands displayed on the exosome surface (Type I and Type II membrane proteins). Type I membrane proteins wherein the N-Terminus is on the luminal (interior) side of the exosome membrane and the C-Terminus is on the exterior of the exosome.

Type II membrane proteins wherein the N-Terminus is on the exterior while the C-Terminus is on the interior.

[0066] FIG. 15 shows a schematic representation of several embodiments of Type I membrane protein constructs, which include but are not limited to: PD-L1, PD-L2, FGL1, OX40L.

[0067] FIG. 16 shows a schematic representation of several embodiments of the surface of an extracellular vesicle engineered with a Type I membrane protein of interest (POI) with a variable membrane anchor. Vesicle targeting sequences such as select sequences from 4F2 (CD98), ADAM10, CD298, TFR2, transmembrane potions of CD9, MARCKS, KRAS, and GPI from CD55. Proteins engineered to include a targeting sequence domain may include one or more linkers between the sticky binder and signaling domain (e.g., an Fc linker or a bond sequence wherein the bond sequence may be dimerization or multimerization sequence).

[0068] FIG. 17 shows a schematic representation of the surface of an exosome engineered with an extracellular portion of the Type II membrane protein of interest (POI) with transmembrane/exosome targeting domains.

[0069] FIG. 18 shows a schematic representation of an exosome engineered with an extracellular portion of the Type II membrane protein 4-1BB.

[0070] FIG. 19 demonstrates a construct design for labeling an exosome surface with Type II membrane proteins.

[0071] FIG. 20 shows a schematic representation of a construct design for labeling an exosome surface with multiple POI domains operably linked by a cleavable (e.g., P2A) linker.

[0072] FIG. 21 shows a flow chart of purification and analytical processes provided herein.

[0073] FIG. 22 shows a PD-L1 labeled exosome constructs.

[0074] FIG. 23 shows several embodiments of the surface of an exosome engineered with PD-L1. The PD-L1 can be the membrane-bound PD-L1 isotype or secreted PD-L1 (SecPD-L1).

[0075] FIG. 24 demonstrates size exclusion chromatography for purifying human PD-L1-GPI (no Fc) exosomes. Left panel: Protein, RNA and DNA measurements in SEC fractions are shown. Invitrogen Qubit fluorometric assays were used to measure biomolecules from unmodified concentrated cell media SEC fractions or hPD-L1-Exo-Tag concentrated cell media SEC fractions. PD-L1 was measured using an R&D systems PD-L1 ELISA kit. Right panel shows dot-blot immunoblot analysis of SEC fractions. A 96-well dot blot apparatus was used to immobilize 50 ul of each SEC fraction onto PVDF. Right bottom figures: Exosome size and concentration was measured in fraction 7 by tunable resistive pulse sensing (TRPS).

[0076] FIG. 25 demonstrates that GPI anchors hPD-L1 on exosomes.

[0077] FIG. 26 demonstrates that a multimodal resin marketed for exosome purification purifies and disaggregates exosomes.

[0078] FIG. 27 shows the exosome decoration with hPD-L1-Fc-GPI.

[0079] FIG. 28A shows the exosome decoration with hPD-L1-Fc-GPI. Fraction 7 contained the purified hPD-L1-Fc-GPI vesicles. FIG. 28B shows size exclusion chromatography (SEC) purification results of various embodiments of human PD-L1 displayed on the surface of extracellular vesicles.

[0080] FIG. 29 shows that mouse PD-L1-Fc-GPI exosomes have higher valency than mPD-L1-GPI.

[0081] FIG. 30A-30C demonstrates comparison proteomics of transprotein expression and shows that surface labeling on the engineered extracellular vesicles provided herein do not affect the relative expression of native and associated exosome proteins. FIG. 30A shows hPD-L1-Fc-GPI. FIG. 30B shows hPD-L2-FcGPI. FIG. 30C shows hCTLA4-Fc-GPI.

[0082] FIG. 31 shows production of mPD-L1-Fc-GPI in STR Bioreactor.

[0083] FIG. 32 shows purification of mPD-L1-Fc-GPI (STR) via SEC. Graph shows mPD-L1 ng/ml vs Total Protein ug/ml.

[0084] FIG. 33 shows purification mPDL1-Fc-GPI (STR bioreactor).

[0085] FIG. 34 shows a schematic representation of the 4-1BBL labeled exosomes. Top: Vector map showing the N-terminal cystolic domain, a transmembrane (TM) domain, and the POI domain at the C-terminus. Bottom: An embodiment of an engineered EV with a type-II membrane display of the fusion protein.

[0086] FIG. 35 shows embodiments of a 4-1BBL display exosome.

[0087] FIG. 36A-36B show the protein engineering and purification of 4F2-4-1BBL labeled exosomes. FIG. 36B confirms that h4-1BBL is displayed on the engineered exosomes.

[0088] FIG. 37 shows internal fusion protein loading of exosomes.

[0089] FIG. 38 shows internal loading of exosomes with mScarlet (RFP).

[0090] FIG. 39A shows internal loading of exosomes with NanoLuc luciferase. FIG. 39B shows tetraspanin characterization of exosomes internally loaded with NanoLuc luciferase.

[0091] FIG. 40A shows the mechanism of PD-L1 engineered extracellular vesicles induce membrane clustering and receptor agonism on a target cell. An exemplary model of proposed mechanism of extracellular vesicles with a Type I membrane protein signaling domain (PD-L1) promoting receptor clustering on a target cell, wherein receptor clustering promotes increased potency of signal transduction of the target receptor. Antagonist antibodies function well at blocking receptors. Antibodies are poor agonist modalities due to their general inability to cluster receptors. Ligands on a membrane surface are potent agonists, however the cost and cold chain logistics of cell therapies makes commercialization difficult and expensive. Extracellular vesicles engineered with Type I membrane protein are able to induce receptor clustering of target receptors and initiate and propagate a potent signal response on a target cell.

[0092] FIG. 40B shows the mechanism of 4-1BBL engineered extracellular vesicles induce membrane clustering and receptor agonism on a target cell. An exemplary model of proposed mechanism of extracellular vesicles with a Type II membrane protein signaling domain (4-1BBL) promoting receptor clustering on a target cell, wherein receptor clustering promotes increased potency of signal transduction of the target receptor. Soluble ligands are often poor agonist modalities due to their general inability to cluster receptors. Ligands displayed on a membrane surface are potent agonists, however the cost and cold chain logistics of cell therapies makes commercialization difficult and expensive. Extracellular vesicles engineered with Type II membrane protein are able to induce receptor clustering of target receptors and initiate and propagate a potent signal response on a target cell.

### DETAILED DESCRIPTION

[0093] The compositions and methods provided herein are based, in part, on the discovery that engineered extracellular vesicles (e.g., exosomes) expressing an engineered fusion protein (e.g., PD-L1) reduces inflammation in an animal model of experimental autoimmune uveoretinitis (EAU), an autoimmune disorder. The compositions and methods provided herein are further based, in part, on the discovery that engineered extracellular vesicles produce enhanced signaling compared to an equal quantity of recombinant ligand. Since some cellular receptors, (e.g., PD-1) require clustering or super-clustering to promote a signaling response, it stands to reason that extracellular vesicles engineered to express ligands on their surface wherein the ligands may engage target receptors on target cells and promote clustering of said target receptors thereby promoting a signal response on said target cell.

[0094] In one aspect, provided herein is an engineered extracellular vesicle comprising: at least one fusion polypeptide comprising: at least one protein of interest (POI) domain; and at least one vesicle targeting domain. In some embodiments of any of the aspects, the engineered extracellular vesicle is an exosome. In some embodiments, of any of the aspects, the fusion protein further comprises at least one linker. In some embodiments of any of the aspects, the POI domain can substantially bind to a target polypeptide. In some embodiments of any of the aspects provided herein, the engineered extracellular vesicle is an artificial synapse.

[0095] Generally, the extracellular vesicles (e.g., exosomes) provided herein are produced by contacting a population of cells with a nucleic acid construct encoding the fusion proteins provided herein and isolating a plurality of extracellular vesicles. The extracellular vesicles can then be purified by methods provided herein and are formulated for therapeutic use, including but not limited to, for the treatment of autoimmune diseases, cancer, or modulating inflammation in a subject.

[0096] The compositions and methods provided herein are specifically designed to exploit the membrane trafficking mechanisms of extracellular vesicles and rely on the hallmark biophysical and biochemical properties of extracellular vesicles, such as exosomes. The vesicles/artificial synapses provided herein are specifically engineered to induce/agonize and propagate biological signaling via a target polypeptide (e.g., by activating a receptor or enzyme or agonizing said receptor or enzyme). Alternatively, the engineered extracellular vesicles provided herein can act as cellular decoys or to reduce or antagonize biological signaling, e.g., by blocking an endogenous ligand from binding to a target cellular receptor and preventing activation of the receptor.

[0097] Engineering of the extracellular vesicles provided herein extends these capabilities significantly by incorporating sticky binders attaching to extracellular vesicles such as exosomes, further coupled with signaling domains of choice. For example, attachment of sticky binders to exosomes, along with their linked signaling domains, allows for receptor clustering for biological signal induction/agonism and propagation not otherwise possible. In this aspect, the aforementioned design achieves the aim of an engineered extracellular vesicle by inducing the desired biological signaling in a target recipient cell.

[0098] Various aspects and embodiments of the compositions and methods are provided herein in detail below.

### Engineered Extracellular Vesicle (EV) Compositions

[0099] The compositions provided herein comprises at least one extracellular vesicle (also termed artificial synapse or abbrv: EV), wherein the extracellular vesicle comprises at least one fusion polypeptide or a plurality of fusion polypeptides comprising: at least one vesicle targeting domain (e.g., sticky binders); and at least one protein of interest domain or a fragment thereof (also termed signaling domains).

[0100] Extracellular vesicles (EVs) are lipid particles that are released from various cell types that function to transfer “cargo” such as nucleic acids and proteins to other cells. EVs are not able to replicate but serve as cell messengers. EV-mediated signals can be transmitted by all the different biomolecule categories—protein, lipids, nucleic acids and sugars—and the unique package of this information provides both protection and the option of simultaneous delivery of multiple different messengers even to sites remote to the vesicular origin. See, e.g., Yáñez-Mó M, Siljander P R, Andreu Z, et al. Biological properties of extracellular vesicles and their physiological functions. J Extracell Vesicles. 2015; 4:27066. Published 2015 May 14. doi:10.3402/jev.v4.27066, which is incorporated herein by reference in its entirety. Furthermore, there is an increasing amount of evidence that shows that EVs can modulate a milieu of cellular signaling processes. See, e.g., Yadid et al. Science Translation Medicine (2020); Cerqueira de Abreu et al. Nature Reviews Cardiology (2020); Zhang W. et al. Protein J. (2019); Zha Q B et al. Tumor Biology. February 2017; Tan et al. (2016) Recent advances of exosomes in immune modulation and autoimmune diseases, Autoimmunity, 49:6, 357-365; Kalluri R, LeBleu V S. et al. The biology, function, and biomedical applications of exosomes. Science. 2020 Feb. 7; 367(6478); which is incorporated herein by reference in its entirety.

[0101] There are various types of extracellular vesicles that are named for their site of origin in a cell, size, and structural and/or functional properties. In some embodiments of any of the aspects provided herein, the extracellular vesicle is an exosome, ectosome, macrovesicle, microparticle, apoptotic body, vesicular organelle, oncosome, exosphere, exomeres, or cell derived nanovesicle (CDN) ((e.g., by genesis via grating or shearing cells), liposomes or the like known by one of ordinary skill in the art. In various embodiments, the extracellular vesicle comprises a phospholipid bilayer with an exterior phospholipid layer and an interior phospholipid layer, wherein the exterior phospholipid layer has an external surface and an internal surface, wherein the interior phospholipid layer has an internal surface and an external surface, and the internal surface of the exterior phospholipid layer faces the internal surface of the interior phospholipid layer, and the phospholipid bilayer encloses an internal space, wherein the external surface of the interior phospholipid layer faces the internal space and wherein the external surface of the exterior phospholipid layer faces an extracellular environment, and the external surface of the inner phospholipid layer is the internal surface of the extracellular vesicle.

[0102] In various embodiments, the extracellular vesicles range in size from 30 nanometers (nm) to 300 nm. In various embodiments, the plurality of EVs range in size from about 30 nm to about 150 nm. In various embodiments, the plurality of EVs or artificial synapses includes one or more artificial synapses that are about 10 nm to about 250 nm in diameter, including those about 10 nm to about 15 nm, about 15 nm to about 20 nm, about 20 nm to about 25 nm, about 25 nm to about 30 nm, about 30 nm to about 35 nm, about 35 nm to about 40 nm, about 40 nm to about 50 nm, about 50 nm to about 60 nm3 about 60 nm to about 70 nm, about 70 nm to about 80 nm, about 80 nm to about 90 nm, about 90 nm to about 95 nm, about 95 nm to about 100 nm, about 100 nm to about 105 nm, about 105 nm to about 110 nm, about 110 nm to about 115 nm, about 115 nm to about 120 nm, about 120 nm to about 125 nm, about 125 nm to about 130 nm, about 130 nm to about 135 nm, about 135 nm to about 140 nm, about 140 nm to about 145 nm, about 145 nm to about 150 nm, about 150 to about 200 nm, about 200 nm to about 250 nm, about 250 nm or more.

[0103] In some embodiments of any of the aspects provided herein, the EV is an exosome. Exosomes are membrane-bound EVs that are produced in the endosomal compartment of most eukaryotic cells. As used herein, the term “exosome” refers to a species of extracellular vesicle between about 20 nm to about 400 μm in diameter, e.g. about 30 nm-200 nm in diameter by inward invagination of a portion of a membrane of an endosome (for example an early or late endosome), wherein the endosome is within a cell comprising a plasma membrane, and the exosome is released from the cell upon fusion of another portion of the endosome membrane with the plasma membrane. An exosome may refer to a species of extracellular vesicle between 20 nm-400 μM in diameter, more preferably 30 nm-200 nm in diameter, that originates by budding of a portion of a plasma membrane from a cell wherein the budded portion of the plasma membrane is released to the extracellular environment.

[0104] The EVs (e.g., exosomes or cell derived vesicles) provided herein may comprise cargo, for example, peptides, proteins, nucleic acids, lipids, metabolites, carbohydrates, biomolecules, small molecules, large molecules, vesicles, organelles, or fragments thereof. Exosome cargo may be located within the internal space of the exosome. EV cargo may be membrane bound spanning one or both layers of the exosome phospholipid bilayer (for example a transmembrane protein). EV cargo may be in contact with the exterior or interior surface of the exosome, for example through a covalent bond or a non-covalent bond. The phospholipid bilayer of the EV or exosome provided herein may comprise one or more transmembrane proteins, wherein a portion of the one or more transmembrane membrane proteins is located within the internal space of the exosome. The phospholipid bilayer of the EV or exosome provided herein may comprise one or more transmembrane proteins, wherein a portion of the one or more transmembrane membrane proteins traverses the EV phospholipid bilayer. The phospholipid bilayer of the EV may comprise one or more transmembrane proteins, wherein the one or more transmembrane membrane proteins comprises a domain on the exterior of the exosome.

[0105] In some embodiments of any of the aspects, the extracellular vesicles or exosomes provided herein endogenously express CD81+, CD82+, CD37+, CD63+, CD9+, CD151+, CD105+, or any combination thereof. In various embodiments, the plurality of artificial synapses includes one or more artificial synapses expressing a biomarker. In certain embodiments, the biomarkers are tetraspanins. In other embodiments, the tetraspanins are one or more selected from the group including CD63, CD81, CD82, CD53, CD151, and CD37. In other embodiments, the artificial synapses express one or more lipid raft associated proteins (e.g., glycosylphosphatidylinositol-anchored proteins and flotillin), cholesterol, sphingolipids such as sphingomyelin, and/or hexosylceramides.

[0106] In other embodiments, the biological protein is related to exosome formation and packaging of cytosolic proteins, e.g., Hsp70, Hsp90, 14-3-3 epsilon, PKM2, GW182 and AGO2. In certain embodiments, the artificial synapses express CD63, HSP70, CD105 or combinations thereof. In other embodiments, the artificial synapses do not express CD9 or CD81, or express neither. For example, plurality of artificial synapses can include one or more artificial synapses that are CD63+, HSP+, CD105+, CD9−, and CD81−.

[0107] The EVs provided herein are specifically engineered to express fusion polypeptides that elicit biological signaling via a target cell. In some embodiments, the fusion polypeptide is overexpressed to elicit a biological response on a target cell or target polypeptide. The engineered EV comprises at least one fusion polypeptide and can comprise a plurality of the same or different fusion polypeptides provided herein. The fusion polypeptides provided herein comprise a protein of interest domain, also termed the signaling domain.

[0108] The fusion polypeptides provided herein can comprise one or more of a protein of interest domain, such that expression of said fusion polypeptide is permitted and that the number of POI domains does not impede protein expression or folding. Furthermore, the EVs provided herein can express more than one fusion protein (e.g., encoded by multiple different nucleic acid constructs). One of skill in the art can appreciate that an engineered EV can include one or more combinations of different signaling domains and/or vesicle targeting domains, or that one can use a plurality of engineered EVs, each including one or more vesicle targeting domains and one or more signaling domains.

[0109] In some embodiments, the EVs provided herein comprise one or more, two or more, three or more, four or more, five or more, six or more, seven or more, eight or more, nine or more, or ten or more fusion proteins. The fusion proteins can be encoded by the same vector or separate vectors. In some embodiments of any of the aspects, the engineered extracellular vesicle comprises at least two POI domains and/or at least two vesicle targeting domains.

[0110] In some embodiments, the fusion polypeptide comprises one or more, two or more, three or more, four or more, five or more, or six or more POI domains on the same polypeptide or nucleic acid construct encoding said polypeptide. For example, the fusion polypeptides provided herein can express a fusion polypeptide encoding one or more, two or more, three or more, four or more, five or more, or six or more signaling domains. In another example, the fusion polypeptides provided herein can express a fusion polypeptide encoding an immune checkpoint protein or a protein involved in immune or cell synapse or any combination or fragment thereof.

[0111] In some embodiments, the EV comprises one or more, two or more, three or more, four or more, five or more, or six or more fusion polypeptides on the same EV. For example, EVs comprising one or more, two or more, three or more, four or more, five or more, or six or more fusion polypeptides wherein the fusion polypeptides encode a signaling domain. In another example, EVs comprising one or more, two or more, three or more, four or more, five or more, or six or more fusion polypeptides wherein the fusion polypeptides encode for one or more immune checkpoint proteins or proteins involved in immune or cell synapse, or any combination or fragment thereof.

[0112] In various embodiments, the signaling domain is a protein or peptide of interest, or a fragment thereof. In various embodiments, the protein of interest (signaling domain) is an immune checkpoint protein. The terms “immune checkpoint protein” or “protein involved in immune or cell synapse” can include but are not limited to adenosine A2A receptor (A2AR), Galectin 9, fibrinogen-like protein 1 (FGL-1), platelet endothelial adhesion factor-1 (PECAM-1), tumor necrosis factor gene 6 protein (TSG-6), Stabilin-1 (STAB-1) also known as Clever-1, Neuropilin 1 (NRP1), Neuropilin 2 (NRP2), semaphorin-3A (SEMA3A), semaphorin-3F (SEMA3F), repulsive guidance molecule B (RGMB) also known as DRG11, T-cell immunoglobulin and mucin domain 3 (TIM-3), T cell immunoreceptor with Ig and ITIM domains (TIGIT), human leukocyte antigen (HLA) class I, HLA class II, high mobility group protein Bi (HMGB1), phosphatidylserine, carcinoembryonic antigen-related cell adhesion molecule 1 (CEACAM-1), T-cell receptor (TCR), Src homology 2 domain-containing protein tyrosine phosphatase 1 (SHP-1), SHP-2, F-Box protein 38 (FBXO38), signaling lymphocytic activation molecule (SLAM)-associated protein (SAP) also known as SH2D1A, B7RP1, indoleamine 2,3-dioxygenase (IDO), NADH oxidase 2 (NOX2), tumor necrosis factor receptor (TNFR) superfamily member 18 (TNFRSF18) (also known as activation inducible TNFR family receptor (AITR), glucocorticoid-induced TNFR related (GITR) protein, and CD357), B7-H4 also known as V-set domain containing T-cell activator inhibitor (VTCN1), B7-H5 (also known as V-domain Ig suppressor of T-cell activation (VISTA), platelet receptor Gi24, and stress induced secreted protein 1 (SISP1), B7-H6 (also known as NCR3LG1), B7-H7 (also known as human endogenous retrovirus-H (HERV-H) long terminal repeat-associating protein 2 (HHLA2), apelin receptor (APLNR), interferon gamma (IFNγ) receptor, programmed cell death-1 (PD-1), Protein Wnt-5a (WNT5A), serine/threonine-protein kinase PAK4, interleukin 6 (IL-6), interleukin-10 (IL-10), NKG2 family of C-type lectin receptors (for example NKG2A, B, C, D, E, F and H), ligands of NKG2 family, killer cell immunoglobulin-like receptors, CD-2, cluster of differentiation 4 (CD4), CD8, CD27, CD27 ligand (CD27L, also known as CD70), CD28, CD28H (also known as transmembrane and immunoglobulin domain containing 2 (TMIGD2) and Ig containing and proline-rich receptor-1 (IGPR1)), CD39, CD40, CD44, integrin associated protein (CD47), carcinoembryonic antigen related cell adhesion molecule 1 (CEACAM1 also known as CD66a), CD73, B7-1 (also known as CD80), B7-2 (also known as CD86), CD94, CD96, immunoglobulin superfamily member 2 (IGSF2) also known as CD101, nectin cell adhesion molecule 2 (NECTIN2) (also known as herpesvirus entry mediator B (HVEB), poliovirus receptor related 2 (PRR2, PVRL2 and PVRR2) and CD112), poliovirus receptor related immunoglobulin domain containing protein (PVIRG) also known as CD112R, CD122 (also known as IL5RB and P70-75), OX40 (also known as tumor necrosis factor receptor superfamily member 4 (TNFRSF4) and CD134), OX40 ligand (OX40L), 4-1BB (also known as CD137), CD134 (also known as 4-1BB ligand (4-1BBL) and as tumor necrosis factor ligand superfamily member 9 (TNFSF9) and CD137L), cytotoxic T-lymphocyte-associated protein 4 (CTLA-4) also known as CD152, CD154 (also known as CD40L), poliovirus receptor (PVR) also known as CD155, killer-cell immunoglobulin-like receptors (KIRs) (for example but not limited to CD158 family, CD158a, CD158g, CD158h, KIR2DL1, KIR2DS1, KIRDS3, and KIR2DS5), CD160, signal-regulatory protein alpha (SIRPα) also known as CD172a, OX-2 also known as CD200, CD200R, lymphocyte-activation gene 3 (LAG-3) also known as CD223, CD226, OX40L also known as CD252, herpes virus entry mediator (HVEM) also known as tumor necrosis factor receptor superfamily member 14 (TNFRSF14) and CD270, B- and T-lymphocyte attenuator (BTLA) also known as CD272, programmed cell death ligand-2 (PD-L2) (also known as B7-DC, PDCD1LG2, and CD273), programmed cell death-ligand 1 (PD-L1) (also known as B7-H1 and CD274), B7-H2 (also known as inducible T-cell co-stimulator ligand (ICOSLG), B7RP1, and CD275), B7-H3 also known as CD276, inducible T-cell co-stimulator (ICOS) also known as CD278, programed cell death protein 1 (PD-1) also known as CD279, leukocyte-associated Ig-like receptor-1 (LAIR-1) also known as CD305, collagen family of proteins (for example but not limited to collagen I, collagen II, collagen M alpha 1, collagen IV, collagen XXIII alpha 1, collagen XXV alpha 1), sialic acid-binding immunoglobulin-type lectin 7 (SIGLEC7) also known as CD328, sialic acid-binding immunoglobulin-type lectin 7 (SIGLEC9) also known as CD329, natural cytotoxicity triggering receptor 3 (NKp30) also known as CD337, or any isoform, fragment, variation thereof, or a ligand to the aforementioned proteins thereof, or the like known by one of ordinary skill in the art. All variants are encompassed by the present invention.

[0113] In some embodiments of any of the aspects provided herein, the protein of interest domain (POI domain) comprises a polypeptide or a fragment thereof or a nucleic acid encoding said polypeptide or fragment thereof selected from the group consisting of: Table 1 (below). Non-limiting examples of nucleic acid sequences that encode the POI domains provided herein are also provided in Table 1.

TABLE 1
Type I Proteins of Interest Amino Acid Sequence

| Protein of | Transcript Sequence (SEQ ID NO:) |
|---|---|
| Interest | Amino Acid Sequence (SEQ ID NO:) |
| Human | >NM_014143.4 Homo sapiens CD274 molecule (CD274), |
| Programmed | transcript variant 1, mRNA |
| death-ligand 1 | AGTTCTGCGCAGCTTCCCGAGGCTCCGCACCAGCCGCGCTTCTGTCCGCCTGCAGG |
| (PD-L1) | GCATTCCAGAAAGATGAGGATATTTGCTGTCTTTATATTCATGACCTACTGGCATT |
| | TGCTGAACGCATTTACTGTCACGGTTCCCAAGGACCTATATGTGGTAGAGTATGGT |
| | AGCAATATGACAATTGAATGCAAATTCCCAGTAGAAAAACAATTAGACCTGGCTGC |
| | ACTAATTGTCTATTGGGAAATGGAGGATAAGAACATTATTCAATTTGTGCATGGAG |
| | AGGAAGACCTGAAGGTTCAGCATAGTAGCTACAGACAGAGGGCCCGGCTGTTGAAG |
| | GACCAGCTCTCCCTGGGAAATGCTGCACTTCAGATCACAGATGTGAAATTGCAGGA |
| | TGCAGGGGTGTACCGCTGCATGATCAGCTATGGTGGTGCCGACTACAAGCGAATTA |
| | CTGTGAAAGTCAATGCCCCATACAACAAAATCAACCAAAGAATTTTGGTTGTGGAT |
| | CCAGTCACCTCTGAACATGAACTGACATGTCAGGCTGAGGGCTACCCCAAGGCCGA |
| | AGTCATCTGGACAAGCAGTGACCATCAAGTCCTGAGTGGTAAGACCACCACCACCA |
| | ATTCCAAGAGAGAGGAGAAGCTTTTCAATGTGACCAGCACACTGAGAATCAACACA |
| | ACAACTAATGAGATTTTCTACTGCACTTTTAGGAGATTAGATCCTGAGGAAAACCA |
| | TACAGCTGAATTGGTCATCCCAGAACTACCTCTGGCACATCCTCCAAATGAAAGGA |
| | CTCACTTGGTAATTCTGGGAGCCATCTTATTATGCCTTGGTGTAGCACTGACATTC |
| | ATCTTCCGTTTAAGAAAAGGGAGAATGATGGATGTGAAAAAATGTGGCATCCAAGA |
| | TACAAACTCAAAGAAGCAAAGTGATACACATTTGGAGGAGACGTAATCCAGCATTG |
| | GAACTTCTGATCTTCAAGCAGGGATTCTCAACCTGTGGTTTAGGGGTTCATCGGGG |
| | CTGAGCGTGACAAGAGGAAGGAATGGGCCCGTGGGATGCAGGCAATGTGGGACTTA |
| | AAAGGCCCAAGCACTGAAAATGGAACCTGGCGAAAGCAGAGGAGGAGAATGAAGAA |
| | AGATGGAGTCAAACAGGGAGCCTGGAGGGAGACCTTGATACTTTCAAATGCCTGAG |
| | GGGCTCATCGACGCCTGTGACAGGGAGAAAGGATACTTCTGAACAAGGAGCCTCCA |
| | AGCAAATCATCCATTGCTCATCCTAGGAAGACGGGTTGAGAATCCCTAATTTGAGG |
| | GTCAGTTCCTGCAGAAGTGCCCTTTGCCTCCACTCAATGCCTCAATTTGTTTTCTG |
| | CATGACTGAGAGTCTCAGTGTTGGAACGGGACAGTATTTATGTATGAGTTTTTCCT |
| | ATTTATTTTGAGTCTGTGAGGTCTTCTTGTCATGTGAGTGTGGTTGTGAATGATTT |
| | CTTTTGAAGATATATTGTAGTAGATGTTACAATTTTGTCGCCAAACTAAACTTGCT |
| | GCTTAATGATTTGCTCACATCTAGTAAAACATGGAGTATTTGTAAGGTGCTTGGTC |
| | TCCTCTATAACTACAAGTATACATTGGAAGCATAAAGATCAAACCGTTGGTTGCAT |
| | AGGATGTCACCTTTATTTAACCCATTAATACTCTGGTTGACCTAATCTTATTCTCA |
| | GACCTCAAGTGTCTGTGCAGTATCTGTTCCATTTAAATATCAGCTTTACAATTATG |
| | TGGTAGCCTACACACATAATCTCATTTCATCGCTGTAACCACCCTGTTGTGATAAC |
| | CACTATTATTTTACCCATCGTACAGCTGAGGAAGCAAACAGATTAAGTAACTTGCC |
| | CAAACCAGTAAATAGCAGACCTCAGACTGCCACCCACTGTCCTTTTATAATACAAT |
| | TTACAGCTATATTTTACTTTAAGCAATTCTTTTATTCAAAAACCATTTATTAAGTG |
| | CCCTTGCAATATCAATCGCTGTGCCAGGCATTGAATCTACAGATGTGAGCAAGACA |
| | AAGTACCTGTCCTCAAGGAGCTCATAGTATAATGAGGAGATTAACAAGAAAATGTA |
| | TTATTACAATTTAGTCCAGTGTCATAGCATAAGGATGATGCGAGGGGAAAACCCGA |
| | GCAGTGTTGCCAAGAGGAGGAAATAGGCCAATGTGGTCTGGGACGGTTGGATATAC |
| | TTAAACATCTTAATAATCAGAGTAATTTTCATTTACAAAGAGAGGTCGGTACTTAA |
| | AATAACCCTGAAAAATAACACTGGAATTCCTTTTCTAGCATTATATTTATTCCTGA |
| | TTTGCCTTTGCCATATAATCTAATGCTTGTTTATATAGTGTCTGGTATTGTTTAAC |
| | AGTTCTGTCTTTTCTATTTAAATGCCACTAAATTTTAAATTCATACCTTTCCATGA |
| | TTCAAAATTCAAAAGATCCCATGGGAGATGGTTGGAAAATCTCCACTTCATCCTCC |
| | AAGCCATTCAAGTTTCCTTTCCAGAAGCAACTGCTACTGCCTTTCATTCATATGTT |
| | CTTCTAAAGATAGTCTACATTTGGAAATGTATGTTAAAAGCACGTATTTTTAAAAT |
| | TTTTTTCCTAAATAGTAACACATTGTATGTCTGCTGTGTACTTTGCTATTTTTATT |
| | TATTTTAGTGTTTCTTATATAGCAGATGGAATGAATTTGAAGTTCCCAGGGCTGAG |
| | GATCCATGCCTTCTTTGTTTCTAAGTTATCTTTCCCATAGCTTTTCATTATCTTTC |
| | ATATGATCCAGTATATGTTAAATATGTCCTACATATACATTTAGACAACCACCATT |
| | TGTTAAGTATTTGCTCTAGGACAGAGTTTGGATTTGTTTATGTTTGCTCAAAAGGA |
| | GACCCATGGGCTCTCCAGGGTGCACTGAGTCAATCTAGTCCTAAAAAGCAATCTTA |
| | TTATTAACTCTGTATGACAGAATCATGTCTGGAACTTTTGTTTTCTGCTTTCTGTC |
| | AAGTATAAACTTCACTTTGATGCTGTACTTGCAAAATCACATTTTCTTTCTGGAAA |
| | TTCCGGCAGTGTACCTTGACTGCTAGCTACCCTGTGCCAGAAAAGCCTCATTCGTT |
| | GTGCTTGAACCCTTGAATGCCACCAGCTGTCATCACTACACAGCCCTCCTAAGAGG |
| | CTTCCTGGAGGTTTCGAGATTCAGATGCCCTGGGAGATCCCAGAGTTTCCTTTCCC |
| | TCTTGGCCATATTCTGGTGTCAATGACAAGGAGTACCTTGGCTTTGCCACATGTCA |
| | AGGCTGAAGAAACAGTGTCTCCAACAGAGCTCCTTGTGTTATCTGTTTGTACATGT |
| | GCATTTGTACAGTAATTGGTGTGACAGTGTTCTTTGTGTGAATTACAGGCAAGAAT |
| | TGTGGCTGAGCAAGGCACATAGTCTACTCAGTCTATTCCTAAGTCCTAACTCCTCC |
| | TTGTGGTGTTGGATTTGTAAGGCACTTTATCCCTTTTGTCTCATGTTTCATCGTAA |
| | ATGGCATAGGCAGAGATGATACCTAATTCTGCATTTGATTGTCACTTTTTGTACCT |
| | GCATTAATTTAATAAAATATTCTTATTTATTTTGTTACTTGGTACACCAGCATGTC |
| | CATTTTCTTGTTTATTTTGTGTTTAATAAAATGTTCAGTTTAACATCCCA (SEQ |
| | ID NO: 1) |
| | >NP_054862.1 programmed cell death 1 ligand 1 isoform a |
| | precursor [Homo sapiens] |
| | MRIFAVFIFMTYWHLLNAFTVTVPKDLYVVEYGSNMTIECKFPVEKQLDLAALIVY |
| | WEMEDKNIIQFVHGEEDLKVQHSSYRQRARLLKDQLSLGNAALQITDVKLQDAGVY |
| | RCMISYGGADYKRITVKVNAPYNKINQRILVVDPVTSEHELTCQAEGYPKAEVIWT |
| | SSDHQVLSGKTTTTNSKREEKLFNVTSTLRINTTTNEIFYCTFRRLDPEENHTAEL |
| | VIPELPLAHPPNERTHLVILGAILLCLGVALTFIFRLRKGRMMDVKKCGIQDTNSK |
| | KQSDTHLEET (SEQ ID NO: 2) |
| Mouse PD-L1 | >NM_021893.3 Mus musculus CD274 antigen (Cd274), mRNA |
| | GAAATCGTGGTCCCCAAGCCTCATGCCAGGCTGCACTTGCACGTCGCGGGCCAGTC |
| | TCCTCGCCTGCAGATAGTTCCCAAAACATGAGGATATTTGCTGGCATTATATTCAC |
| | AGCCTGCTGTCACTTGCTACGGGCGTTTACTATCACGGCTCCAAAGGACTTGTACG |
| | TGGTGGAGTATGGCAGCAACGTCACGATGGAGTGCAGATTCCCTGTAGAACGGGAG |
| | CTGGACCTGCTTGCGTTAGTGGTGTACTGGGAAAAGGAAGATGAGCAAGTGATTCA |
| | GTTTGTGGCAGGAGAGGAGGACCTTAAGCCTCAGCACAGCAACTTCAGGGGGAGAG |
| | CCTCGCTGCCAAAGGACCAGCTTTTGAAGGGAAATGCTGCCCTTCAGATCACAGAC |
| | GTCAAGCTGCAGGACGCAGGCGTTTACTGCTGCATAATCAGCTACGGTGGTGCGGA |
| | CTACAAGCGAATCACGCTGAAAGTCAATGCCCCATACCGCAAAATCAACCAGAGAA |
| | TTTCCGTGGATCCAGCCACTTCTGAGCATGAACTAATATGTCAGGCCGAGGGTTAT |
| | CCAGAAGCTGAGGTAATCTGGACAAACAGTGACCACCAACCCGTGAGTGGGAAGAG |
| | AAGTGTCACCACTTCCCGGACAGAGGGGATGCTTCTCAATGTGACCAGCAGTCTGA |
| | GGGTCAACGCCACAGCGAATGATGTTTTCTACTGTACGTTTTGGAGATCACAGCCA |
| | GGGCAAAACCACACAGCGGAGCTGATCATCCCAGAACTGCCTGCAACACATCCTCC |
| | ACAGAACAGGACTCACTGGGTGCTTCTGGGATCCATCCTGTTGTTCCTCATTGTAG |
| | TGTCCACGGTCCTCCTCTTCTTGAGAAAACAAGTGAGAATGCTAGATGTGGAGAAA |
| | TGTGGCGTTGAAGATACAAGCTCAAAAAACCGAAATGATACACAATTCGAGGAGAC |
| | GTAAGCAGTGTTGAACCCTCTGATCGTCGATTGGCAGCTTGTGGTCTGTGAAAGAA |
| | AGGGCCCATGGGACATGAGTCCAAAGACTCAAGATGGAACCTGAGGGAGAGAACCA |
| | AGAAAGTGTTGGGAGAGGAGCCTGGAACAACGGACATTTTTTCCAGGGAGACACTG |
| | CTAAGCAAGTTGCCCATCAGTCGTCTTGGGAAATGGATTGAGGGTTCCTGGCTTAG |
| | CAGCTGGTCCTTGCACAGTGACCTTTTCCTCTGCTCAGTGCCGGGATGAGAGATGG |
| | AGTCATGAGTGTTGAAGAATAAGTGCCTTCTATTTATTTTGAGTCTGTGTGTTCTC |
| | ACTTTGGGCATGTAATTATGACTGGTGAATTCTGACGACATGATAGATCTTAAGAT |
| | GTAGTCACCAAACTCAACTGCTGCTTAGCATCCTCCGTAACTACTGATACAAGCAG |
| | GGAACACAGAGGTCACCTGCTTGGTTTGACAGGCTCTTGCTGTCTGACTCAAATAA |
| | TCTTTATTTTTCAGTCCTCAAGGCTCTTCGATAGCAGTTGTTCTGTATCAGCCTTA |
| | TAGGTGTCAGGTATAGCACTCAACATCTCATCTCATTACAATAGCAACCCTCATCA |
| | CCATAGCAACAGCTAACCTCTGTTATCCTCACTTCATAGCCAGGAAGCTGAGCGAC |
| | TAAGTCACTTGCCCACAGAGTATCAGCTCTCAGATTTCTGTTCTTCAGCCACTGTC |
| | CTTTCAGGATAGAATTTGTCGTTAAGAAATTAATTTAAAAACTGATTATTGAGTAG |
| | CATTGTATATCAATCACAACATGCCTTGTGCACTGTGCTGGCCTCTGAGCATAAAG |
| | ATGTACGCCGGAGTACCGGTCGGACATGTTTATGTGTGTTAAATACTCAGAGAAAT |
| | GTTCATTAACAAGGAGCTTGCATTTTAGAGACACTGGAAAGTAACTCCAGTTCATT |
| | GTCTAGCATTACATTTACCTCATTTGCTATCCTTGCCATACAGTCTCTTGTTCTCC |
| | ATGAAGTGTCATGAATCTTGTTGAATAGTTCTTTTATTTTTTAAATGTTTCTATTT |
| | AAATGATATTGACATCTGAGGCGATAGCTCAGTTGGTAAAACCCTTTCCTCACAAG |
| | TGTGAAACCCTGAGTCTTATCCCTAGAACCCACATAAAAAACAGTTGCGTATGTTT |
| | GTGCATGCTTTTGATCCCAGCACTAGGGAGGCAGAGGCAGGCAGATCCTGAGCTCT |
| | CATTGACCACCCAGCCTAGCCTACATGGTTAGCTCCAGGCCTACAGGAGCTGGCAG |
| | AGCCTGAAAAACGATGCCTAGACACACACACACACACACACACACACACACACACA |
| | CACACACACCATGTACTCATAGACCTAAGTGCACCCTCCTACACATGCACACACAT |
| | ACAATTCAAACACAAATCAACAGGGAATTGTCTCAGAATGGTCCCCAAGACAAAGA |
| | AGAAGAAAAACACCAAACCAGCTCTATTCCCTCAGCCTATCCTCTCTACTCCTTCC |
| | TAGAAGCAACTACTATTGTTTTTGTATATAAATTTACCCAACGACAGTTAATATGT |
| | AGAATATATATTAAAGTGTCTGTCAATATATATTATCTCTTTCTTTCTTTCTTCCT |
| | TTCTTTCTTTCTTTCTTTCTTTCTTTCTTTCTTTCTTTCTTTCTTTCTTCCTTCCT |
| | TCCTTCCTTCCTTCCTTCCTTCCTTCCTTTCTTTCTTTCTTTCTTTTTTTCTGTCT |
| | ATCTGTACCTAAATGGTTGCTCACTATGCATTTTCTGTGCTCTTCGCCCTTTTTAT |
| | TTAATGTATGGATATTTATGCTGCTTCCAGAATGGATCTAAAGCTCTTTGTTTCTA |
| | GGTTTTCTCCCCCATCCTTCTAGGCATCTCTCACACTGTCTAGGCCAGACACCATG |
| | TCTGCTGCCTGAATCTGTAGACACCATTTATAAAGCACGTACTCACCGAGTTTGTA |
| | TTTGGCTTGTTCTGTGTCTGATTAAAGGGAGACCATGAGTCCCCAGGGTACACTGA |
| | GTTACCCCAGTACCAAGGGGGAGCCTTGTTTGTGTCTCCATGGCAGAAGCAGGCCT |
| | GGAGCCATTTTGGTTTCTTCCTTGACTTCTCTCAAACACAGACGCCTCACTTGCTC |
| | ATTACAGGTTCTCCTTTGGGAATGTCAGCATTGCTCCTTGACTGCTGGCTGCCCTG |
| | GAAGGAGCCCATTAGCTCTGTGTGAGCCCTTGACAGCTACTGCCTCTCCTTACCAC |
| | AGGGGCCTCTAAGATACTGTTACCTAGAGGTCTTGAGGATCTGTGTTCTCTGGGGG |
| | GAGGAAAGGAGGAGGAACCCAGAACTTTCTTACAGTTTTCCTTGTTCTGTCACATG |
| | TCAAGACTGAAGGAACAGGCTGGGCTACGTAGTGAGATCCTGTCTCAAAGGAAAGA |
| | CGAGCATAGCCGAACCCCCGGTGGAACCCCCTCTGTTACCTGTTCACACAAGCTTA |
| | TTGATGAGTCTCATGTTAATGTCTTGTTTGTATGAAGTTTAAGAAAATATCGGGTT |
| | GGGCAACACATTCTATTTATTCATTTTATTTGAAATCTTAATGCCATCTCATGGTG |
| | TTGGATTGGTGTGGCACTTTATTCTTTTGTGTTGTGTATAACCATAAATTTTATTT |
| | TGCATCAGATTGTCAATGTATTGCATTAATTTAATAAATATTTTTATTTATTAAAA |
| | AAAAAAAAAAAAA (SEQ ID NO: 3) |
| | >NP_068693.1 programmed cell death 1 ligand 1 precursor |
| | [Mus musculus] |
| | MRIFAGIIFTACCHLLRAFTITAPKDLYVVEYGSNVTMECRFPVERELDLLALVVY |
| | WEKEDEQVIQFVAGEEDLKPQHSNERGRASLPKDQLLKGNAALQITDVKLQDAGVY |
| | CCIISYGGADYKRITLKVNAPYRKINQRISVDPATSEHELICQAEGYPEAEVIWTN |
| | SDHQPVSGKRSVTTSRTEGMLLNVTSSLRVNATANDVFYCTFWRSQPGQNHTAELI |
| | IPELPATHPPQNRTHWVLLGSILLFLIVVSTVLLFLRKQVRMLDVEKCGVEDTSSK |
| | NRNDTQFEET (SEQ ID NO: 4) |
| Human PD-L2 | >NM_025239.4 Homo sapiens programmed cell death 1 ligand |
| | 2 (PDCD1LG2), mRNA |
| | ACTCTCATGTTACGGCAAACCTTAAGCTGAATGAACAACTTTTCTTCTCTTGAATA |
| | TATCTTAACGCCAAATTTTGAGTGCTTTTTTGTTACCCATCCTCATATGTCCCAGC |
| | TAGAAAGAATCCTGGGTTGGAGCTACTGCATGTTGATTGTTTTGTTTTTCCTTTTG |
| | GCTGTTCATTTTGGTGGCTACTATAAGGAAATCTAACACAAACAGCAACTGTTTTT |
| | TGTTGTTTACTTTTGCATCTTTACTTGTGGAGCTGTGGCAAGTCCTCATATCAAAT |
| | ACAGAACATGATCTTCCTCCTGCTAATGTTGAGCCTGGAATTGCAGCTTCACCAGA |
| | TAGCAGCTTTATTCACAGTGACAGTCCCTAAGGAACTGTACATAATAGAGCATGGC |
| | AGCAATGTGACCCTGGAATGCAACTTTGACACTGGAAGTCATGTGAACCTTGGAGC |
| | AATAACAGCCAGTTTGCAAAAGGTGGAAAATGATACATCCCCACACCGTGAAAGAG |
| | CCACTTTGCTGGAGGAGCAGCTGCCCCTAGGGAAGGCCTCGTTCCACATACCTCAA |
| | GTCCAAGTGAGGGACGAAGGACAGTACCAATGCATAATCATCTATGGGGTCGCCTG |
| | GGACTACAAGTACCTGACTCTGAAAGTCAAAGCTTCCTACAGGAAAATAAACACTC |
| | ACATCCTAAAGGTTCCAGAAACAGATGAGGTAGAGCTCACCTGCCAGGCTACAGGT |
| | TATCCTCTGGCAGAAGTATCCTGGCCAAACGTCAGCGTTCCTGCCAACACCAGCCA |
| | CTCCAGGACCCCTGAAGGCCTCTACCAGGTCACCAGTGTTCTGCGCCTAAAGCCAC |
| | CCCCTGGCAGAAACTTCAGCTGTGTGTTCTGGAATACTCACGTGAGGGAACTTACT |
| | TTGGCCAGCATTGACCTTCAAAGTCAGATGGAACCCAGGACCCATCCAACTTGGCT |
| | GCTTCACATTTTCATCCCCTTCTGCATCATTGCTTTCATTTTCATAGCCACAGTGA |
| | TAGCCCTAAGAAAACAACTCTGTCAAAAGCTGTATTCTTCAAAAGACACAACAAAA |
| | AGACCTGTCACCACAACAAAGAGGGAAGTGAACAGTGCTATCTGAACCTGTGGTCT |
| | TGGGAGCCAGGGTGACCTGATATGACATCTAAAGAAGCTTCTGGACTCTGAACAAG |
| | AATTCGGTGGCCTGCAGAGCTTGCCATTTGCACTTTTCAAATGCCTTTGGATGACC |
| | CAGCACTTTAATCTGAAACCTGCAACAAGACTAGCCAACACCTGGCCATGAAACTT |
| | GCCCCTTCACTGATCTGGACTCACCTCTGGAGCCTATGGCTTTAAGCAAGCACTAC |
| | TGCACTTTACAGAATTACCCCACTGGATCCTGGACCCACAGAATTCCTTCAGGATC |
| | CTTCTTGCTGCCAGACTGAAAGCAAAAGGAATTATTTCCCCTCAAGTTTTCTAAGT |
| | GATTTCCAAAAGCAGAGGTGTGTGGAAATTTCCAGTAACAGAAACAGATGGGTTGC |
| | CAATAGAGTTATTTTTTATCTATAGCTTCCTCTGGGTACTAGAAGAGGCTATTGAG |
| | ACTATGAGCTCACAGACAGGGCTTCGCACAAACTCAAATCATAATTGACATGTTTT |
| | ATGGATTACTGGAATCTTGATAGCATAATGAAGTTGTTCTAATTAACAGAGAGCAT |
| | TTAAATATACACTAAGTGCACAAATTGTGGAGTAAAGTCATCAAGCTCTGTTTTTG |
| | AGGTCTAAGTCACAAAGCATTTGTTTTAACCTGTAATGGCACCATGTTTAATGGTG |
| | GTTTTTTTTTTGAACTACATCTTTCCTTTAAAAATTATTGGTTTCTTTTTATTTGT |
| | TTTTACCTTAGAAATCAATTATATACAGTCAAAAATATTTGATATGCTCATACGTT |
| | GTATCTGCAGCAATTTCAGATAAGTAGCTAAAATGGCCAAAGCCCCAAACTAAGCC |
| | TCCTTTTCTGGCCCTCAATATGACTTTAAATTTGACTTTTCAGTGCCTCAGTTTGC |
| | ACATCTGTAATACAGCAATGCTAAGTAGTCAAGGCCTTTGATAATTGGCACTATGG |
| | AAATCCTGCAAGATCCCACTACATATGTGTGGAGCAGAAGGGTAACTCGGCTACAG |
| | TAACAGCTTAATTTTGTTAAATTTGTTCTTTATACTGGAGCCATGAAGCTCAGAGC |
| | ATTAGCTGACCCTTGAACTATTCAAATGGGCACATTAGCTAGTATAACAGACTTAC |
| | ATAGGTGGGCCTAAAGCAAGCTCCTTAACTGAGCAAAATTTGGGGCTTATGAGAAT |
| | GAAAGGGTGTGAAATTGACTAACAGACAAATCATACATCTCAGTTTCTCAATTCTC |
| | ATGTAAATCAGAGAATGCCTTTAAAGAATAAAACTCAATTGTTATTCTTCAACGTT |
| | CTTTATATATTCTACTTTTGGGTA (SEQ ID NO: 5) |
| | >NP_079515.2 programmed cell death 1 ligand 2 precursor |
| | [Homo sapiens] |
| | MIFLLLMLSLELQLHQIAALFTVTVPKELYIIEHGSNVTLECNFDTGSHVNLGAIT |
| | ASLQKVENDTSPHRERATLLEEQLPLGKASFHIPQVQVRDEGQYQCIIIYGVAWDY |
| | KYLTLKVKASYRKINTHILKVPETDEVELTCQATGYPLAEVSWPNVSVPANTSHSR |
| | TPEGLYQVTSVLRLKPPPGRNFSCVFWNTHVRELTLASIDLQSQMEPRTHPTWLLH |
| | IFIPFCIIAFIFIATVIALRKQLCQKLYSSKDTTKRPVTTTKREVNSAI (SEQ ID |
| | NO: 6) |
| Mouse PD-L2 | >NM_021396.2 Mus musculus programmed cell death 1 ligand |
| | 2 (Pdcd1lg2), mRNA |
| | GACCACATCATTTTTGTTCCCTTTGTTGGATATATCCTAATGTCAAATGTGGCATA |
| | TCTTTGTTGTCTCCTTCTGTCTCCCAACTAGAGAGAACACACTTACGGCTCCTGTC |
| | CCGGGCAGGTTTGGTTGTCGGTGTGATTGGCTTCCAGGGAACCTGATACAAGGAGC |
| | AACTGTGTGCTGCCTTTTCTGTGTCTTTGCTTGAGGAGCTGTGCTGGGTGCTGATA |
| | TTGACACAGACCATGCTGCTCCTGCTGCCGATACTGAACCTGAGCTTACAACTTCA |
| | TCCTGTAGCAGCTTTATTCACCGTGACAGCCCCTAAAGAAGTGTACACCGTAGACG |
| | TCGGCAGCAGTGTGAGCCTGGAGTGCGATTTTGACCGCAGAGAATGCACTGAACTG |
| | GAAGGGATAAGAGCCAGTTTGCAGAAGGTAGAAAATGATACGTCTCTGCAAAGTGA |
| | AAGAGCCACCCTGCTGGAGGAGCAGCTGCCCCTGGGAAAGGCTTTGTTCCACATCC |
| | CTAGTGTCCAAGTGAGAGATTCCGGGCAGTACCGTTGCCTGGTCATCTGCGGGGCC |
| | GCCTGGGACTACAAGTACCTGACGGTGAAAGTCAAAGCTTCTTACATGAGGATAGA |
| | CACTAGGATCCTGGAGGTTCCAGGTACAGGGGAGGTGCAGCTTACCTGCCAGGCTA |
| | GAGGTTATCCCCTAGCAGAAGTGTCCTGGCAAAATGTCAGTGTTCCTGCCAACACC |
| | AGCCACATCAGGACCCCCGAAGGCCTCTACCAGGTCACCAGTGTTCTGCGCCTCAA |
| | GCCTCAGCCTAGCAGAAACTTCAGCTGCATGTTCTGGAATGCTCACATGAAGGAGC |
| | TGACTTCAGCCATCATTGACCCTCTGAGTCGGATGGAACCCAAAGTCCCCAGAACG |
| | TGGCCACTTCATGTTTTCATCCCGGCCTGCACCATCGCTTTGATCTTCCTGGCCAT |
| | AGTGATAATCCAGAGAAAGAGGATCTAGGGGAAGCTGTATTACGGAAGAAGATCTG |
| | GACCTGCGGTCTTGGGAGTTGGAAGGATCTGATGGGAAACCCTCAAGAGACTTCTG |
| | GACTCAAAGTGAGAATCTTGCAGGACCTGCCATTTGCACTTTTGAACCCTTTGGAC |
| | GGTGACCCAGGGCTCCGAAGAGGAGCTTGTAAGACTGACAATCTTCCCTCTGTCTC |
| | AAGACTCTCTGAACAGCAAGACCCCAATGGCACTTTAGACTTACCCCTGGGATCCT |
| | GGACCCCAGTGAGGGCCTAAGGCTCCTAATGACTTTCAGGGTGAGAACAAAAGGAA |
| | TTGCTCTCCGCCCCACCCCCACCTCCTGCTTTCCGCAGGGAGACATGGAAATTCCC |
| | AGTTACTAAAATAGATTGTCAATAGAGTTATTTATAGCCCTCATTTCCTCCGGGGA |
| | CTTGGAAGCTTCAGACAGGGTTTTTCATAAACAAAGTCATAACTGATGTGTTTTAC |
| | AGCATCCTAGAATCCTGGCAGCCTCTGAAGTTCTAATTAACTGGAAGCATTTAAGC |
| | AACACGTTAAGTACCCCCACTGTGGTATTTGTTTCTACTTTTCTGTTTTTAAAGTG |
| | TGAGTCACAAGGTAATTGTTGTAACCTGTGATATCACTGTTTCTTGTGTCTCTTCT |
| | TTCAACTACATCTTTTAAAACAAAACGGTGTGGGGTTTGGTTGTTTTGGTGGTAGT |
| | GGTAGTGTTTCTCAGTGGTATCTCCTTAAGAAAAAAAATCATCATGCCAGTGAPTT |
| | GTTTCTTCAGCCATTTCAGATGGGAAGCTGGAATAGCCTGTCCCCCAAGCTAAGCC |
| | TTCTTCCCTAGCTTTCTGCGTGATTTTACATTGAGCATTCCTGTTGCTTTGTTTCT |
| | ATAACTGTAATGTGGTGATGTCATTGTTAGGGCACTTGAGGGTGGGCGTTCTGGAA |
| | GTCCTTTCAGGTTAGTGTTTGGGGGCAGGGTTGCTCAGAATACATAAAGGTGCTAA |
| | CTTAAACTGCAGCCATGGAGCTCAGTGAATTCACTAACCTTCGGGCTGTCCAAATG |
| | TGCACATTAGCTACTGTGACCCCTGTAGGTTAGGGAGCCTGAAGCCAGCTCTTTAC |
| | CTGGTGTTTAGACTCAGCAGAATTTGGAGTCAATGGGACCAAATGGTTGTGAAATT |
| | AAGATTTGAAGTGTGCATCTTATTTTATCACCATCTGCCCAACAAAACTTCAGAAA |
| | ATGCCTTTGAAGCACAAAAATGTAATCGTTTATGTGAAATCTCTGAGTTGCATTTA |
| | GATGCCCATTGCAGCAAGGTGGCTCTCTCACAGATTCCACACCTTAGCCTAAGATA |
| | CCAGACAGCAGGACAGAGAGAAAAGTCCTTCCTGGTGTGCAAACTTCCTTACACTG |
| | GACCTCGCCTCTCAGGTGTGTGATTGGTAGGCCAAATCCCGATAGCCAATCGGTGT |
| | TGGGTGCTTTGTCTGCTCTACTGGGAGTCCAGTGGTACAATGGATTCTGGCAAAAT |
| | GCTGCCATCTTGGCCCTCGCTGGGCTGCTTTCTAGGATATTCATAGAGAAAGGGCC |
| | GTCCAGATCCAGTATCCTAAAATCCTGAGAGGAGAATATAAGTTAGTGTGTCTCAC |
| | TATAACTATCTCTATGATCGGTCACATTACTATCTAACAGTTACCAAATACTATAT |
| | GCCTAATACTGGTAAGCATTTTATACACACCATTGGATTGAATCCTCTCAAAATCC |
| | TCAAAAAGGAAGTTATTAATACCTCCATAGGCAAGGAGCCCAGAACCCAGAGAGGT |
| | CAGGCAGTCTAGTTATAGATGCCTGCTTTGTTTAGAAGTGAACAAGAGCATCAAAT |
| | TATTAATGTGCCCTGGTTATTAATGCGCCCTGGTTACCTGCTGGATGGAACATCAA |
| | GGTGGACTTTTGGCAGTTGCATACACCCAGAGGTATTTTGGCTATTCACGGATTAA |
| | TTTCACACGAAGTGTTTCAGAGACATGTGTAGGGGAAGTCCGGGTTCAGGGGGCCT |
| | AAGATTCAAACTCTAGCTTAGCTACGTCTGACCTCCCTAAGCACTAACTTACTATC |
| | AAAAGAATGAGCAGTAAAAGAATGGTGTTTACTGCCTGCCTTTATCAGGCAGTGAA |
| | CGTGCAGCGGGCAACGAATGCTTGATAAGTGTGTGTCAGTGTGAAGTCCCATGTAC |
| | CAGCCGCTGTCCCCACTGCAAAAGCAGCAGAGCGCTCAGACATCATCAGCTGATTT |
| | ACCAGCAGCAGATTTCTTCTTCTAGTCCCATCCCTGAAGAAGCTTCCAGCCTAGGT |
| | ACATTGCATGGGCTTTGTGCTCCAGGAGTTCCTACACAGCCCTCAACTTCAACACA |
| | GGCAAAGTGCTTACTGATCCTCATGTATCTTACAGGGTCCCCTCTACCCACAATAC |
| | CTCATTGCTGGAACTTCAAATCTTCCTGAATAAAAGCTTGCCCGTGGTTTAATTA |
| | (SEQ ID NO: 7) |
| | >NP_067371.1 programmed cell death 1 ligand 2 precursor |
| | [Mus musculus] |
| | MLLLLPILNLSLQLHPVAALFTVTAPKEVYTVDVGSSVSLECDFDRRECTELEGIR |
| | ASLQKVENDTSLQSERATLLEEQLPLGKALFHIPSVQVRDSGQYRCLVICGAAWDY |
| | KYLTVKVKASYMRIDTRILEVPGTGEVQLTCQARGYPLAEVSWQNVSVPANTSHIR |
| | TPEGLYQVTSVLRLKPQPSRNFSCMFWNAHMKELTSAIIDPLSRMEPKVPRTWPLH |
| | VFIPACTIALIFLAIVIIQRKRI (SEQ ID NO: 8) |
| Human | >NM_005214.5 Homo sapiens cytotoxic T-lymphocyte |
| CTLA-4 | associated protein 4 (CTLA4), transcript variant 1, mRNA |
| (CD152) | GCTTTCTATTCAAGTGCCTTCTGTGTGTGCACATGTGTAATACATATCTGGGATCA |
| | AAGCTATCTATATAAAGTCCTTGATTCTGTGTGGGTTCAAACACATTTCAAAGCTT |
| | CAGGATCCTGAAAGGTTTTGCTCTACTTCCTGAAGACCTGAACACCGCTCCCATAA |
| | AGCCATGGCTTGCCTTGGATTTCAGCGGCACAAGGCTCAGCTGAACCTGGCTACCA |
| | GGACCTGGCCCTGCACTCTCCTGTTTTTTCTTCTCTTCATCCCTGTCTTCTGCAAA |
| | GCAATGCACGTGGCCCAGCCTGCTGTGGTACTGGCCAGCAGCCGAGGCATCGCCAG |
| | CTTTGTGTGTGAGTATGCATCTCCAGGCAAAGCCACTGAGGTCCGGGTGACAGTGC |
| | TTCGGCAGGCTGACAGCCAGGTGACTGAAGTCTGTGCGGCAACCTACATGATGGGG |
| | AATGAGTTGACCTTCCTAGATGATTCCATCTGCACGGGCACCTCCAGTGGAAATCA |
| | AGTGAACCTCACTATCCAAGGACTGAGGGCCATGGACACGGGACTCTACATCTGCA |
| | AGGTGGAGCTCATGTACCCACCGCCATACTACCTGGGCATAGGCAACGGAACCCAG |
| | ATTTATGTAATTGATCCAGAACCGTGCCCAGATTCTGACTTCCTCCTCTGGATCCT |
| | TGCAGCAGTTAGTTCGGGGTTGTTTTTTTATAGCTTTCTCCTCACAGCTGTTTCTT |
| | TGAGCAAAATGCTAAAGAAAAGAAGCCCTCTTACAACAGGGGTCTATGTGAAAATG |
| | CCCCCAACAGAGCCAGAATGTGAAAAGCAATTTCAGCCTTATTTTATTCCCATCAA |
| | TTGAGAAACCATTATGAAGAAGAGAGTCCATATTTCAATTTCCAAGAGCTGAGGCA |
| | ATTCTAACTTTTTTGCTATCCAGCTATTTTTATTTGTTTGTGCATTTGGGGGGAAT |
| | TCATCTCTCTTTAATATAAAGTTGGATGCGGAACCCAAATTACGTGTACTACAATT |
| | TAAAGCAAAGGAGTAGAAAGACAGAGCTGGGATGTTTCTGTCACATCAGCTCCACT |
| | TTCAGTGAAAGCATCACTTGGGATTAATATGGGGATGCAGCATTATGATGTGGGTC |
| | AAGGAATTAAGTTAGGGAATGGCACAGCCCAAAGAAGGAAAAGGCAGGGAGCGAGG |
| | GAGAAGACTATATTGTACACACCTTATATTTACGTATGAGACGTTTATAGCCGAAA |
| | TGATCTTTTCAAGTTAAATTTTATGCCTTTTATTTCTTAAACAAATGTATGATTAC |
| | ATCAAGGCTTCAAAAATACTCACATGGCTATGTTTTAGCCAGTGATGCTAAAGGTT |
| | GTATTGCATATATACATATATATATATATATATATATATATATATATATATATATA |
| | TATATATATATATATTTTAATTTGATAGTATTGTGCATAGAGCCACGTATGTTTTT |
| | GTGTATTTGTTAATGGTTTGAATATAAACACTATATGGCAGTGTCTTTCCACCTTG |
| | GGTCCCAGGGAAGTTTTGTGGAGGAGCTCAGGACACTAATACACCAGGTAGAACAC |
| | AAGGTCATTTGCTAACTAGCTTGGAAACTGGATGAGGTCATAGCAGTGCTTGATTG |
| | CGTGGAATTGTGCTGAGTTGGTGTTGACATGTGCTTTGGGGCTTTTACACCAGTTC |
| | CTTTCAATGGTTTGCAAGGAAGCCACAGCTGGTGGTATCTGAGTTGACTTGACAGA |
| | ACACTGTCTTGAAGACAATGGCTTACTCCAGGAGACCCACAGGTATGACCTTCTAG |
| | GAAGCTCCAGTTCGATGGGCCCAATTCTTACAAACATGTGGTTAATGCCATGGACA |
| | GAAGAAGGCAGCAGGTGGCAGAATGGGGTGCATGAAGGTTTCTGAAAATTAACACT |
| | GCTTGTGTTTTTAACTCAATATTTTCCATGAAAATGCAACAACATGTATAATATTT |
| | TTAATTAAATAAAAATCTGTGGTGGTCGTTTTCCGGA (SEQ ID NO: 9) |
| | >NP_005205.2 cytotoxic T-lymphocyte protein 4 isoform |
| | CTLA4-TM precursor [Homo sapiens] |
| | MACLGFQRHKAQLNLATRTWPCTLLFFLLFIFVFCKAMHVAQPAVVLASSRGIASF |
| | VCEYASPGKATEVRVTVLRQADSQVTEVCAATYMMGNELTFLDDSICTGTSSGNQV |
| | NLTIQGLRAMDTGLYICKVELMYPPPYYLGTGNGTQTYVIDPEPCPDSDFLLWILA |
| | AVSSGLFFYSFLLTAVSLSKMLKKRSPLTTGVYVKMPPTEPECEKQFQPYFIPIN |
| | (SEQ ID NO: 10) |
| Mouse CTLA- | >NM_009843.4 Mus musculus cytotoxic T-lymphocyte- |
| 4 (CD152) | associated protein 4 (Ctla4), transcript variant 1, mRNA |
| | CTACACATATGTAGCACGTACCTTGGATCAAAGCTGTCTATATAAAGTCCCCGAGT |
| | CTGTGTGGGTTCAAACACATCTCAAGGCTTCTGGATCCTGTTGGGTTTTACTCTGC |
| | TCCCTGAGGACCTCAGCACATTTGCCCCCCAGCCATGGCTTGTCTTGGACTCCGGA |
| | GGTACAAAGCTCAACTGCAGCTGCCTTCTAGGACTTGGCCTTTTGTAGCCCTGCTC |
| | ACTCTTCTTTTCATCCCAGTCTTCTCTGAAGCCATACAGGTGACCCAACCTTCAGT |
| | GGTGTTGGCTAGCAGCCATGGTGTCGCCAGCTTTCCATGTGAATATTCACCATCAC |
| | ACAACACTGATGAGGTCCGGGTGACTGTGCTGCGGCAGACAAATGACCAAATGACT |
| | GAGGTCTGTGCCACGACATTCACAGAGAAGAATACAGTGGGCTTCCTAGATTACCC |
| | CTTCTGCAGTGGTACCTTTAATGAAAGCAGAGTGAACCTCACCATCCAAGGACTGA |
| | GAGCTGTTGACACGGGACTGTACCTCTGCAAGGTGGAACTCATGTACCCACCGCCA |
| | TACTTTGTGGGCATGGGCAACGGGACGCAGATTTATGTCATTGATCCAGAACCATG |
| | CCCGGATTCTGACTTCCTCCTTTGGATCCTTGTCGCAGTTAGCTTGGGGTTGTTTT |
| | TTTACAGTTTCCTGGTCACTGCTGTTTCTTTGAGCAAGATGCTAAAGAAAAGAAGT |
| | CCTCTTACAACAGGGGTCTATGTGAAAATGCCCCCAACAGAGCCAGAATGTGAAAA |
| | GCAATTTCAGCCTTATTTTATTCCCATCAACTGAAAGGCCGTTTATGAAGAAGAAG |
| | GAGCATACTTCAGTCTCTAAAAGCTGAGGCAATTTCAACTTTCCTTTTCTCTCCAG |
| | CTATTTTTACCTGTTTGTATATTTTAAGGAGAGTATGCCTCTCTTTAATAGAAAGC |
| | TGGATGCAAAATTCCAATTAAGCATACTACAATTTAAAGCTAAGGAGCATGAACAG |
| | AGAGCTGGGATATTTCTGTTGTGTCAGAACCATTTTACTAAAAGCATCACTTGGAA |
| | GCAGCATAAGGATATAGCATTATGGTGTGGGGTCAAGGGAACATTAGGGAATGGCA |
| | CAGCCCAAAGAAAGGAAGGGGGTGAAGGAAGAGATTATATTGTACACATCTTGTAT |
| | TTACCTGAGAGATGTTTATGACTTAAATAATTTTTAAATTTTTCATGCTGTTATTT |
| | TCTTTAACAATGTATAATTACACGAAGGTTTAAACATTTATTCACAGAGCTATGTG |
| | ACATAGCCAGTGGTTCCAAAGGTTGTAGTGTTCCAAGATGTATTTTTAAGTAATAT |
| | TGTACATGGGTGTTTCATGTGCTGTTGTGTATTTGCTGGTGGTTTGAATATAAACA |
| | CTATGTATCAGTGTCGTCCCACAGTGGGTCCTGGGGAGGTTTGGCTGGGGAGCTTA |
| | GGACACTAATCCATCAGGTTGGACTCGAGGTCCTGCACCAACTGGCTTGGAAACTA |
| | GATGAGGCTGTCACAGGGCTCAGTTGCATAAACCGATGGTGATGGAGTGTAAACTG |
| | GGTCTTTACACTCATTTTATTTTTTGTTTCTGCTTTTGTTTTCTTCAATGATTTGC |
| | AAGGAAACCAAAAGCTGGCAGTGTTTGTATGAACCTGACAGAACACTGTCTTCAAG |
| | GAAATGCCTCATTCCTGAGACCAGTAGGTTTGTTTTTTTAGGAAGTTCCAATACTA |
| | GGACCCCCTACAAGTACTATGGCTCCTCGAAAACACAAAGTTAATGCCACAGGAAG |
| | CAGCAGATGGTAGGATGGGATGCACAAGAGTTCCTGAAAACTAACACTGTTAGTGT |
| | TTTTTTTTTAACTCAATATTTTCCATGAAAATGCAACCACATGTATAATATTTTTA |
| | ATTAAATAAAAGTTTCTTGTGATTGTTTT (SEQ ID NO: 11) |
| | >NP_033973.2 cytotoxic T-lymphocyte protein 4 isoform 1 |
| | precursor [Mus musculus] |
| | MACLGLRRYKAQLQLPSRTWPFVALLTLLFIPVFSEAIQVTQPSVVLASSHGVASF |
| | PCEYSPSHNTDEVRVTVLRQTNDQMTEVCATTFTEKNTVGFLDYPFCSGTFNESRV |
| | NLTIQGLRAVDTGLYLCKVELMYPPPYFVGMGNGTQTYVIDPEPCPDSDFLLWILV |
| | AVSLGLFFYSFLVTAVSLSKMLKKRSPLTTGVYVKMPPTEPECEKQFQPYFIPIN |
| | (SEQ ID NO: 12) |
| Human 4- | >NM_003811.4 Homo sapiens TNF superfamily member 9 |
| 1BBL | (TNFSF9), mRNA |
| (CD137L) | AGTCTCTCGTCATGGAATACGCCTCTGACGCTTCACTGGACCCCGAAGCCCCGTGG |
| | CCTCCCGCGCCCCGCGCTCGCGCCTGCCGCGTACTGCCTTGGGCCCTGGTCGCGGG |
| | GCTGCTGCTGCTGCTGCTGCTCGCTGCCGCCTGCGCCGTCTTCCTCGCCTGCCCCT |
| | GGGCCGTGTCCGGGGCTCGCGCCTCGCCCGGCTCCGCGGCCAGCCCGAGACTCCGC |
| | GAGGGTCCCGAGCTTTCGCCCGACGATCCCGCCGGCCTCTTGGACCTGCGGCAGGG |
| | CATGTTTGCGCAGCTGGTGGCCCAAAATGTTCTGCTGATCGATGGGCCCCTGAGCT |
| | GGTACAGTGACCCAGGCCTGGCAGGCGTGTCCCTGACGGGGGGCCTGAGCTACAAA |
| | GAGGACACGAAGGAGCTGGTGGTGGCCAAGGCTGGAGTCTACTATGTCTTCTTTCA |
| | ACTAGAGCTGCGGCGCGTGGTGGCCGGCGAGGGCTCAGGCTCCGTTTCACTTGCGC |
| | TGCACCTGCAGCCACTGCGCTCTGCTGCTGGGGCCGCCGCCCTGGCTTTGACCGTG |
| | GACCTGCCACCCGCCTCCTCCGAGGCTCGGAACTCGGCCTTCGGTTTCCAGGGCCG |
| | CTTGCTGCACCTGAGTGCCGGCCAGCGCCTGGGCGTCCATCTTCACACTGAGGCCA |
| | GGGCACGCCATGCCTGGCAGCTTACCCAGGGCGCCACAGTCTTGGGACTCTTCCGG |
| | GTGACCCCCGAAATCCCAGCCGGACTCCCTTCACCGAGGTCGGAATAACGTCCAGC |
| | CTGGGTGCAGCCCACCTGGACAGAGTCCGAATCCTACTCCATCCTTCATGGAGACC |
| | CCTGGTGCTGGGTCCCTGCTGCTTTCTCTACCTCAAGGGGCTTGGCAGGGGTCCCT |
| | GCTGCTGACCTCCCCTTGAGGACCCTCCTCACCCACTCCTTCCCCAAGTTGGACCT |
| | TGATATTTATTCTGAGCCTGAGCTCAGATAATATATTATATATATTATATATATAT |
| | ATATATTTCTATTTAAAGAGGATCCTGAGTTTGTGAATGGACTTTTTTAGAGGAGT |
| | TGTTTTGGGGGGGGGGGGGTCTTCGACATTGCCGAGGCTGGTCTTGAACTCCTGGA |
| | CTTAGACGATCCTCCTGCCTCAGCCTCCCAAGCAACTGGGATTCATCCTTTCTATT |
| | AATTCATTGTACTTATTTGCTTATTTGTGTGTATTGAGCATCTGTAATGTGCCAGC |
| | ATTGTGCCCAGGCTAGGGGGCTATAGAAACATCTAGAAATAGACTGAAAGAAAATC |
| | TGAGTTATGGTAATACGTGAGGAATTTAAAGACTCATCCCCAGCCTCCACCTCCTG |
| | TGTGATACTTGGGGGCTAGCTTTTTTCTTTCTTTCTTTTTTTTGAGATGGTCTTGT |
| | TCTGTCAACCAGGCTAGAATGCAGCGGTGCAATCATGAGTCAATGCAGCCTCCAGC |
| | CTCGACCTCCCGAGGCTCAGGTGATCCTCCCATCTCAGCCTCTCGAGTAGCTGGGA |
| | CCACAGTTGTGTGCCACCACACTTGGCTAACTTTTTAATTTTTTTGCGGAGACGGT |
| | ATTGCTATGTTGCCAAGGTTGTTTACATGCCAGTACAATTTATAATAAACACTCAT |
| | TTTTCCTCCC (SEQ ID NO: 13) |
| | >NP_003802.1 tumor necrosis factor ligand superfamily |
| | member 9 [Homo sapiens] |
| | MEYASDASLDPEAPWPPAPRARACRVLPWALVAGLLLLLLLAAACAVFLACPWAVS |
| | GARASPGSAASPRLREGPELSPDDPAGLLDLRQGMFAQLVAQNVLLIDGPLSWYSD |
| | PGLAGVSLTGGLSYKEDTKELVVAKAGVYYVFFQLELRRVVAGEGSGSVSLALHLQ |
| | PLRSAAGAAALALTVDLPPASSEARNSAFGFQGRLLHLSAGQRLGVHLHTEARARH |
| | AWQLTQGATVLGLFRVTPEIPAGLPSPRSE (SEQ ID NO: 14) |
| Mouse4-1BBL | >NM_009404.3 Mus musculus tumor necrosis factor (ligand) |
| (CD137L) | superfamily, member 9 (Infsf9), mRNA |
| | ATAAAGCACGGGCACTGGCGGGAGACGTGCACTGACCGACCGTGGTAATGGACCAG |
| | CACACACTTGATGTGGAGGATACCGCGGATGCCAGACATCCAGCAGGTACTTCGTG |
| | CCCCTCGGATGCGGCGCTCCTCAGAGATACCGGGCTCCTCGCGGACGCTGCGCTCC |
| | TCTCAGATACTGTGCGCCCCACAAATGCCGCGCTCCCCACGGATGCTGCCTACCCT |
| | GCGGTTAATGTTCGGGATCGCGAGGCCGCGTGGCCGCCTGCACTGAACTTCTGTTC |
| | CCGCCACCCAAAGCTCTATGGCCTAGTCGCTTTGGTTTTGCTGCTTCTGATCGCCG |
| | CCTGTGTTCCTATCTTCACCCGCACCGAGCCTCGGCCAGCGCTCACAATCACCACC |
| | TCGCCCAACCTGGGTACCCGAGAGAATAATGCAGACCAGGTCACCCCTGTTTCCCA |
| | CATTGGCTGCCCCAACACTACACAACAGGGCTCTCCTGTGTTCGCCAAGCTACTGG |
| | CTAAAAACCAAGCATCGTTGTGCAATACAACTCTGAACTGGCACAGCCAAGATGGA |
| | GCTGGGAGCTCATACCTATCTCAAGGTCTGAGGTACGAAGAAGACAAAAAGGAGTT |
| | GGTGGTAGACAGTCCCGGGCTCTACTACGTATTTTTGGAACTGAAGCTCAGTCCAA |
| | CATTCACAAACACAGGCCACAAGGTGCAGGGCTGGGTCTCTCTTGTTTTGCAAGCA |
| | AAGCCTCAGGTAGATGACTTTGACAACTTGGCCCTGACAGTGGAACTGTTCCCTTG |
| | CTCCATGGAGAACAAGTTAGTGGACCGTTCCTGGAGTCAACTGTTGCTCCTGAAGG |
| | CTGGCCACCGCCTCAGTGTGGGTCTGAGGGCTTATCTGCATGGAGCCCAGGATGCA |
| | TACAGAGACTGGGAGCTGTCTTATCCCAACACCACCAGCTTTGGACTCTTTCTTGT |
| | GAAACCCGACAACCCATGGGAATGAGAACTATCCTTCTTGTGACTCCTAGTTGCTA |
| | AGTCCTCAAGCTGCTATGTTTTATGGGGTCTGAGCAGGGGTCCCTTCCATGACTTT |
| | CTCTTGTCTTTAACTGGACTTGGTATTTATTCTGAGCATAGCTCAGACAAGACTTT |
| | ATATAATTCACTAGATAGCATTAGTAAACTGCTGGGCAGCTGCTAGATAAAAAAAA |
| | ATTTCTAAATCAAAGTTTATATTTATATTAATATATAAAAATAAATGTGTTTGT |
| | (SEQ ID NO: 15) |
| | >NP_033430.1 tumor necrosis factor ligand superfamily |
| | member 9 [Mus musculus] |
| | MDQHTLDVEDTADARHPAGTSCPSDAALLRDTGLLADAALLSDTVRPTNAALPTDA |
| | AYPAVNVRDREAAWPPALNFCSRHPKLYGLVALVLLLLIAACVPIFTRTEPRPALT |
| | ITTSPNLGTRENNADQVTPVSHIGCPNTTQQGSPVFAKLLAKNQASLCNTTLNWHS |
| | QDGAGSSYLSQGLRYEEDKKELVVDSPGLYYVFLELKLSPTFTNTGHKVQGWVSLV |
| | LQAKPQVDDFDNLALTVELFPCSMENKLVDRSWSQLLLLKAGHRLSVGLRAYLHGA |
| | QDAYRDWELSYPNTTSFGLFLVKPDNPWE (SEQ ID NO: 16) |
| Human | >NM_003820.4 Homo sapiens TNF receptor superfamily member |
| HVEM | 14 (TNFRSF14), transcript variant 1, DNA |
| (CD270) | ATACCGGCCCTTCCCCTCGGCTTTGCCTGGACAGCTCCTGCCTCCCGCAGGGCCCA |
| | CCTGTGTCCCCCAGCGCCGCTCCACCCAGCAGGCCTGAGCCCCTCTCTGCTGCCAG |
| | ACACCCCCTGCTGCCCACTCTCCTGCTGCTCGGGTTCTGAGGCACAGCTTGTCACA |
| | CCGAGGCGGATTCTCTTTCTCTTTCTCTTTCTCTTCTGGCCCACAGCCGCAGCAAT |
| | GGCGCTGAGTTCCTCTGCTGGAGTTCATCCTGCTAGCTGGGTTCCCGAGCTGCCGG |
| | TCTGAGCCTGAGGCATGGAGCCTCCTGGAGACTGGGGGCCTCCTCCCTGGAGATCC |
| | ACCCCCAAAACCGACGTCTTGAGGCTGGTGCTGTATCTCACCTTCCTGGGAGCCCC |
| | CTGCTACGCCCCAGCTCTGCCGTCCTGCAAGGAGGACGAGTACCCAGTGGGCTCCG |
| | AGTGCTGCCCCAAGTGCAGTCCAGGTTATCGTGTGAAGGAGGCCTGCGGGGAGCTG |
| | ACGGGCACAGTGTGTGAACCCTGCCCTCCAGGCACCTACATTGCCCACCTCAATGG |
| | CCTAAGCAAGTGTCTGCAGTGCCAAATGTGTGACCCAGCCATGGGCCTGCGCGCGA |
| | GCCGGAACTGCTCCAGGACAGAGAACGCCGTGTGTGGCTGCAGCCCAGGCCACTTC |
| | TGCATCGTCCAGGACGGGGACCACTGCGCCGCGTGCCGCGCTTACGCCACCTCCAG |
| | CCCGGGCCAGAGGGTGCAGAAGGGAGGCACCGAGAGTCAGGACACCCTGTGTCAGA |
| | ACTGCCCCCCGGGGACCTTCTCTCCCAATGGGACCCTGGAGGAATGTCAGCACCAG |
| | ACCAAGTGCAGCTGGCTGGTGACGAAGGCCGGAGCTGGGACCAGCAGCTCCCACTG |
| | GGTATGGTGGTTTCTCTCAGGGAGCCTCGTCATCGTCATTGTTTGCTCCACAGTTG |
| | GCCTAATCATATGTGTGAAAAGAAGAAAGCCAAGGGGTGATGTAGTCAAGGTGATC |
| | GTCTCCGTCCAGCGGAAAAGACAGGAGGCAGAAGGTGAGGCCACAGTCATTGAGGC |
| | CCTGCAGGCCCCTCCGGACGTCACCACGGTGGCCGTGGAGGAGACAATACCCTCAT |
| | TCACGGGGAGGAGCCCAAACCACTGACCCACAGACTCTGCACCCCGACGCCAGAGA |
| | TACCTGGAGCGACGGCTGCTGAAAGAGGCTGTCCACCTGGCGGAACCACCGGAGCC |
| | CGGAGGCTTGGGGGCTCCGCCCTGGGCTGGCTTCCGTCTCCTCCAGTGGAGGGAGA |
| | GGTGGGGCCCCTGCTGGGGTAGAGCTGGGGACGCCACGTGCCATTCCCATGGGCCA |
| | GTGAGGGCCTGGGGCCTCTGTTCTGCTGTGGCCTGAGCTCCCCAGAGTCCTGAGGA |
| | GGAGCGCCAGTTGCCCCTCGCTCACAGACCACACACCCAGCCCTCCTGGGCCAGCC |
| | CAGAGGGCCCTTCAGACCCCAGCTGTCTGCGCGTCTGACTCTTGTGGCCTCAGCAG |
| | GACAGGCCCCGGGCACTGCCTCACAGCCAAGGCTGGACTGGGTTGGCTGCAGTGTG |
| | GTGTTTAGTGGATACCACATCGGAAGTGATTTTCTAAATTGGATTTGAATTCGGCT |
| | CCTGTTTTCTATTTGTCATGAAACAGTGTATTTGGGGAGATGCTGTGGGAGGATGT |
| | AAATATCTTGTTTCTCCTCAAA (SEQ ID NO: 17) |
| | >NP_003811.2 tumor necrosis factor receptor superfamily |
| | member 14 isoform 1 precursor [Homo sapiens] |
| | MEPPGDWGPPPWRSTPKTDVLRLVLYLTFLGAPCYAPALPSCKEDEYPVGSECCPK |
| | CSPGYRVKEACGELTGTVCEPCPPGTYIAHLNGLSKCLQCQMCDPAMGLRASRNCS |
| | RTENAVCGCSPGHFCIVQDGDHCAACRAYATSSPGQRVQKGGTESQDTLCQNCPPG |
| | TFSPNGTLEECQHQTKCSWLVTKAGAGTSSSHWVWWFLSGSLVIVIVCSTVGLIIC |
| | VKRRKPRGDVVKVIVSVQRKRQEAEGEATVIEALQAPPDVTTVAVEETIPSFTGRS |
| | PNH (SEQ ID NO: 18) |
| Mouse HVEM | >NM_178931.2 Mus musculus tumor necrosis factor receptor |
| (CD270) | superfamily, member 14 (herpesvirus entry mediator) |
| | (Tnfrsf14), mRNA |
| | GCTCTTGGCCTGAAGTTTCTTGATCAAGAAAATGGAACCTCTCCCAGGATGGGGGT |
| | CGGCACCCTGGAGCCAGGCCCCTACAGACAACACCTTCAGGCTGGTGCCTTGTGTC |
| | TTCCTTTTGAACTTGCTGCAGCGCATCTCTGCCCAGCCCTCATGCAGACAGGAGGA |
| | GTTCCTTGTGGGAGACGAGTGCTGCCCCATGTGCAACCCAGGTTACCATGTGAAGC |
| | AGGTCTGCAGTGAGCATACAGGCACAGTGTGTGCCCCCTGTCCCCCACAGACATAT |
| | ACCGCCCATGCAAATGGCCTGAGCAAGTGTCTGCCCTGCGGAGTCTGTGATCCAGA |
| | CATGGGCCTGCTGACCTGGCAGGAGTGCTCCAGCTGGAAGGACACTGTGTGCAGAT |
| | GCATCCCAGGCTACTTCTGTGAGAACCAGGATGGGAGCCACTGTTCCACATGCTTG |
| | CAGCACACCACCTGCCCTCCAGGGCAGAGGGTAGAGAAGAGAGGGACTCACGACCA |
| | GGACACTGTATGTGCTGACTGCCTAACAGGGACCTTCTCACTTGGAGGGACTCAGG |
| | AGGAATGCCTGCCCTGGACCAACTGCAGTGCATTTCAACAGGAAGTAAGACGTGGG |
| | ACCAACAGCACAGACACCACCTGCTCCTCCCAGGTCGTCTACTACGTTGTGTCCAT |
| | CCTTTTGCCACTTGTGATAGTGGGAGCTGGGATAGCTGGATTCCTCATCTGCACGC |
| | GAAGACACCTGCACACCAGCTCAGTGGCCAAGGAGCTGGAGCCTTTCCAGGAACAA |
| | CAGGAGAACACCATCAGGTTTCCAGTCACCGAGGTTGGGTTTGCTGAGACCGAGGA |
| | GGAGACAGCCTCCAACTGAACAAATTCTGGGTGACAAGACACCGAGGAGACGT |
| | (SEQ ID NO: 19) |
| | >NP_849262.1 tumor necrosis factor receptor superfamily |
| | member 14 precursor [Mus musculus] |
| | MEPLPGWGSAPWSQAPTDNTFRLVPCVFLLNLLQRISAQPSCRQEEFLVGDECCPM |
| | CNPGYHVKQVCSEHTGTVCAPCPPQTYTAHANGLSKCLPCGVCDPDMGLLTWQECS |
| | SWKDTVCRCIPGYFCENQDGSHCSTCLQHTTCPPGQRVEKRGTHDQDTVCADCLTG |
| | TFSLGGTQEECLPWTNCSAFQQEVRRGTNSTDTTCSSQVVYYVVSILLPLVIVGAG |
| | IAGFLICTRRHLHTSSVAKELEPFQEQQENTIRFPVTEVGFAETEEETASN (SEQ |
| | ID NO: 20) |
| Human FGL1 | >NM_004467.4 Homo sapiens fibrinogen like 1 (FGL1), |
| | transcript variant 1, mRNA |
| | AATGCAGTTACAGGATCCTGGGAAGCAGAGTGTCTGGATGGAACCTGAGCTGGGTC |
| | TCTGACTCACTTCTGACTTTAGTTTTTTCAAGGGGGAACATGGCAAAGGTGTTCAG |
| | TTTCATCCTTGTTACCACCGCTCTGACAATGGGCAGGGAAATTTCGGCGCTCGAGG |
| | ACTGTGCCCAGGAGCAGATGCGGCTCAGAGCCCAGGTGCGCCTGCTTGAGACCCGG |
| | GTCAAACAGCAACAGGTCAAGATCAAGCAGCTTTTGCAGGAGAATGAAGTCCAGTT |
| | CCTTGATAAAGGAGATGAGAATACTGTCATTGATCTTGGAAGCAAGAGGCAGTATG |
| | CAGATTGTTCAGAGATTTTCAATGATGGGTATAAGCTCAGTGGATTTTACAAAATC |
| | AAACCTCTCCAGAGCCCAGCAGAATTTTCTGTTTATTGTGACATGTCCGATGGAGG |
| | AGGATGGACTGTAATTCAGAGACGATCTGATGGCAGTGAAAACTTTAACAGAGGAT |
| | GGAAAGACTATGAAAATGGCTTTGGAAATTTTGTCCAAAAACATGGTGAATATTGG |
| | CTGGGCAATAAAAATCTTCACTTCTTGACCACTCAAGAAGACTACACTTTAAAAAT |
| | CGACCTTGCAGATTTTGAAAAAAATAGCCGTTATGCACAATATAAGAATTTCAAAG |
| | TTGGAGATGAAAAGAATTTCTACGAGTTGAATATTGGGGAATATTCTGGAACAGCT |
| | GGAGATTCCCTTGCGGGGAATTTTCATCCTGAGGTGCAGTGGTGGGCTAGTCACCA |
| | AAGAATGAAATTCAGCACGTGGGACAGAGATCATGACAACTATGAAGGGAACTGCG |
| | CAGAAGAAGATCAGTCTGGCTGGTGGTTTAACAGGTGTCACTCTGCAAACCTGAAT |
| | GGTGTATACTACAGCGGCCCCTACACGGCTAAAACAGACAATGGGATTGTCTGGTA |
| | CACCTGGCATGGGTGGTGGTATTCTCTGAAATCTGTGGTTATGAAAATTAGGCCAA |
| | ATGATTTTATTCCAAATGTAATTTAATTGCTGCTGTTGGGCTTTCGTTTCTGCAAT |
| | TCAGCTTTGTTTAAAGTGATTTGAAAAATACTCATTCTGAACATATCCATGCGCAA |
| | TCATGATAACTGTTGTGAGTAGTGCTTTTCATTCTTCTCACTTGCCTTTGTTACTT |
| | AATGTGCTTTCAGTACAGCAGATATGCAATATTCACCAAATAAATGTAGACTGTGT |
| | TAATA (SEQ ID NO: 21) |
| | >NP_004458.3 fibrinogen-like protein 1 precursor [Homo |
| | sapiens] |
| | MAKVFSFILVTTALTMGREISALEDCAQEQMRLRAQVRLLETRVKQQQVKIKQLLQ |
| | ENEVQFLDKGDENTVIDLGSKRQYADCSEIFNDGYKLSGFYKIKPLQSPAEFSVYC |
| | DMSDGGGWTVIQRRSDGSENFNRGWKDYENGFGNFVQKHGEYWLGNKNLHFLTTQE |
| | DYTLKIDLADFEKNSRYAQYKNFKVGDEKNEYELNIGEYSGTAGDSLAGNFHPEVQ |
| | WWASHQRMKFSTWDRDHDNYEGNCAEEDQSGWWFNRCHSANLNGVYYSGPYTAKTD |
| | NGIVWYTWHGWWYSLKSVVMKIRPNDFIPNVI (SEQ ID NO: 22) |
| Mouse FGL1 | >NM_145594.2 Mus musculus fibrinogen-like protein 1 |
| | (Fgl1), mRNA |
| | GTTAGAAGTTCCTGGGAGGCTCTGTGTGGATGGACTGAGCCTAGCTAAGTCCTGAT |
| | TCATTTTGACTTGAGTTCTCTCAGTGGGAAGAATGGGAAAGATTTACAGCTTCGTC |
| | CTGGTCGCCATTGCTCTGATGATGGGAAGGGAAGGTTGGGCCCTCGAGAGTGAGAA |
| | CTGCTTGCGGGAGCAGGTGAGGCTCAGGGCTCAGGTGCACCAGCTTGAGACCCGGG |
| | TCAAACAACAACAGACCATGATTGCACAGCTCTTGCATGAGAAGGAAGTCCAGTTT |
| | CTGGATAAAGGATCGGAGAACAGTTTCATTGACCTTGGAGGCAAGAAGCAGTATGC |
| | AGATTGTTCAGAGATTTACAATGACGGATTTAAGCAGAGTGGATTTTACAAAATCA |
| | AACCTCTTCAGAGCCTGGCAGAATTCTCTGTTTATTGTGACATGTCTGATGGAGGG |
| | GGATGGACTGTAATTCAGAGACGATCTGATGGCAGTGAGAACTTTAACAGGGGTTG |
| | GAATGACTATGAAAATGGCTTTGGAAACTTTGTCCAAAACAATGGCGAATACTGGC |
| | TGGGTAACAAAAACATTAACTTGCTAACTATTCAAGGAGACTACACTTTAAAAATC |
| | GACCTGACAGATTTTGAGAAAAACAGCAGCTTCGCACAATACCAAAGTTTTAAAGT |
| | TGGTGATAAAAAGTCTTTTTATGAACTAAATATTGGAGAATATTCTGGCACAGCTG |
| | GAGATTCCCTGTCAGGAACTTTTCATCCTGAAGTACAGTGGTGGGCTAGTCACCAA |
| | AGGATGAAGTTCAGCACGTGGGACAGAGATAACGACAATTACCAAGGAAACTGTGC |
| | TGAGGAAGAGCAGTCTGGCTGGTGGTTTAACAGGTGTCACTCTGCAAACCTGAACG |
| | GTGTTTACTACCGTGGTTCCTACAGGGCAGAAACGGATAATGGTGTTGTGTGGTAC |
| | ACCTGGCATGGGTGGTGGTATTCCTTGAAATCTGTGGTTATGAAAATTAGGCCAAG |
| | TGATTTTATTCCAAATATTATTTAGTTGCCCTCATTGGGATCTCCTTTCTGTAATT |
| | CATCTTGGTTTACTTGAAAATAAATATTTGAAAAAGATATAATTCTGAATAACACA |
| | (SEQ ID NO: 23) |
| | >NP_663569.2 fibrinogen-like protein 1 precursor [Mus |
| | musculus] |
| | MGKIYSFVLVAIALMMGREGWALESENCLREQVRLRAQVHQLETRVKQQQTMIAQL |
| | LHEKEVQFLDKGSENSFIDLGGKKQYADCSEIYNDGFKQSGFYKIKPLQSLAEFSV |
| | YCDMSDGGGWTVIQRRSDGSENFNRGWNDYENGFGNFVQNNGEYWLGNKNINLLTI |
| | QGDYTLKIDLTDFEKNSSFAQYQSFKVGDKKSFYELNIGEYSGTAGDSLSGTFHPE |
| | VQWWASHQRMKFSTWDRDNDNYQGNCAEEEQSGWWFNRCHSANLNGVYYRGSYRAE |
| | TDNGVVWYTWHGWWYSLKSVVMKIRPSDFIPNII (SEQ ID NO: 24) |
| Human OX-2 | >NM_005944.7 Homo sapiens CD200 molecule (CD200), |
| (CD200) | transcript variant 1, mRNA |
| | AGAGCTCCAGGCGCACATCCGCAGTCAGCCACCTCGCGCGCGCCTCCAGGAGCAAG |
| | GATGGAGAGGCTGGTGATCAGGATGCCCTTCTCTCATCTGTCTACCTACAGCCTGG |
| | TTTGGGTCATGGCAGCAGTGGTGCTGTGCACAGCACAAGTGCAAGTGGTGACCCAG |
| | GATGAAAGAGAGCAGCTGTACACACCTGCTTCCTTAAAATGCTCTCTGCAAAATGC |
| | CCAGGAAGCCCTCATTGTGACATGGCAGAAAAAGAAAGCTGTAAGCCCAGAAAACA |
| | TGGTCACCTTCAGCGAGAACCATGGGGTGGTGATCCAGCCTGCCTATAAGGACAAG |
| | ATAAACATTACCCAGCTGGGACTCCAAAACTCAACCATCACCTTCTGGAATATCAC |
| | CCTGGAGGATGAAGGGTGTTACATGTGTCTCTTCAATACCTTTGGTTTTGGGAAGA |
| | TCTCAGGAACGGCCTGCCTCACCGTCTATGTACAGCCCATAGTATCCCTTCACTAC |
| | AAATTCTCTGAAGACCACCTAAATATCACTTGCTCTGCCACTGCCCGCCCAGCCCC |
| | CATGGTCTTCTGGAAGGTCCCTCGGTCAGGGATTGAAAATAGTACAGTGACTCTGT |
| | CTCACCCAAATGGGACCACGTCTGTTACCAGCATCCTCCATATCAAAGACCCTAAG |
| | AATCAGGTGGGGAAGGAGGTGATCTGCCAGGTGCTGCACCTGGGGACTGTGACCGA |
| | CTTTAAGCAAACCGTCAACAAAGGCTATTGGTTTTCAGTTCCGCTATTGCTAAGCA |
| | TTGTTTCCCTGGTAATTCTTCTCGTCCTAATCTCAATCTTACTGTACTGGAAACGT |
| | CACCGGAATCAGGACCGAGAGCCCTAAATAAGTCACACAGCACCCTGAAAGTGATT |
| | CCCTGGTCTACTTGAATTTGACACAAGAGAAAAGCAGGAGGAAAAGGGGCCATTCT |
| | CCAAAGGACCTGAAAGAGCAAAAGAGGTGGGAGCGAAAGCCTTAAGGATCCCACGA |
| | CTTTTTACTGCCATCTGAGCTACTCAGTGTTTGAATCCCAAGAGGAAGTCAGTTTA |
| | CCTCTCAGGTCTGTTGTAGGACTTGATTTTGTAAAGCAATGCCATGTTATGTGGTT |
| | GAAAGGGCACTGGACTTAGTTAGTATCAGGAGCACTGAGCTCACAGACTGACTTGG |
| | GCTCCTACTGGTGGGGACCTCTGTTAGTCACTTTACCTCATCCAAAGTATAAAGGA |
| | ATTGGACCAAATAATTTACCACATAGCTCTAAAACTTAATTTAAAATGTAATTCCA |
| | GAAAAAAAAAGGGAATAAGCAAAGGGGGAAGAATTGAAAGAGAGAGAGAAGAAAGA |
| | ATACAGAGAGCTTACCTTTTGCCTTTCTGTTGATGTTACATCTCTTCTTCCTATGT |
| | TCTTAGGTCTATGAGTCTGTTTCCCCATCATTTGGTATCTAGTCCAGTTCCTGCTT |
| | ACTGCTTTGCTAATAGCTGGCCTTGCTAGAATCCTTGGTTTCACTGCTGTTCTTCA |
| | TGTGCTTCTATGAGATTTACTCCAACACAAATAGGACTGAATTTATTGTGAAGTAA |
| | CATTGGCAATCTTAACTTATTCATTTAACTTATTTTTATAGCTAGATAAATATTGT |
| | TAGTCTTAGACAATAGCTCACATTTTTTGAGAAGCATGCCCTCCCTGTCCATTTGT |
| | CTTATAACATGACCCAGCCCTATTTTACGTCATTCTAAATTCAGCCTCATATAATG |
| | AAAATACATTATGAAAACAGATGTTTAGGAGATTTCCTGTATAGCAGTCAGCCAAT |
| | TCATATGCTTTGTCTCTGCTGGCTTCTTTTTCCATGCGTTAACTTTTCCCAATAGC |
| | AGAGGAGGCAAATATGAGCATACAATCCCTTTGTTCTAAAGATATTGTTCCAGCTA |
| | GTGGAATGATGTTGAATCTTTAATAACCATAATTAGTTGCTTTTTCAGTATCTTCT |
| | GCTTTGTCTGTGTCTATCCAGTGGCCTAGGAATTAAAGTGTAAGTTGTTTTCGCTG |
| | TTAAATTGGATATTTATATATATATATAGCAAGATTTTCATGTGTTATTTAATTCT |
| | GTATTGTTTCTTATATTTGTAGTAAAATATTGAACAATTAAAAGTGTTGACTCCAA |
| | A (SEQ ID NO: 25) |
| | >NP_005935.4 OX-2 membrane glycoprotein isoform a |
| | precursor [Homo sapiens] |
| | MERLVIRMPFSHLSTYSLVWVMAAVVLCTAQVQVVTQDEREQLYTPASLKCSLQNA |
| | QEALIVTWQKKKAVSPENMVTFSENHGVVIQPAYKDKINITQLGLQNSTITFWNIT |
| | LEDEGCYMCLFNTFGFGKISGTACLTVYVQPIVSLHYKFSEDHLNITCSATARPAP |
| | MVFWKVPRSGIENSTVTLSHPNGTTSVTSILHIKDPKNQVGKEVICQVLHLGTVTD |
| | FKQTVNKGYWFSVPLLLSIVSLVILLVLISILLYWKRHRNQDREP (SEQ ID NO: |
| | 26) |
| Mouse OX-2 | >NM_010818.3 Mus musculus CD200 antigen (Cd200), |
| (CD200) | transcript variant 1, mRNA |
| | GGGCGTGGTTGGTTGGTCGTCTCTTCCTCCACACTAGAGGAGCTGTAGAGTCTGCC |
| | TGTGCAGTGGAGGGGGCTCTCTCTACGGCGAATAGTAGTGTCCCTGCTCACAGGTG |
| | TTGCGGAGATATCCTCCATCGTGGAAGAGCTCAGACCCCGAGAAGCTGGTGTCTAG |
| | CTGCGGCCCAGAGCAAGGATGGGCAGTCTGGTATTCAGGAGACCTTTCTGCCATCT |
| | CTCCACCTACAGCCTGATTTGGGGCATGGCAGCAGTAGCGCTGAGCACAGCTCAAG |
| | TGGAAGTGGTGACCCAGGATGAAAGAAAGGCGCTGCACACAACTGCATCCTTACGA |
| | TGTTCTCTAAAAACATCCCAGGAACCCTTGATTGTGACATGGCAGAAAAAGAAAGC |
| | CGTGAGCCCAGAAAACATGGTCACCTACAGCAAAACCCATGGGGTTGTAATCCAGC |
| | CTGCCTACAAAGACAGGATAAATGTCACAGAGCTGGGACTCTGGAACTCAAGCATC |
| | ACCTTCTGGAACACAACATTGGAAGATGAGGGCTGCTACATGTGTCTCTTCAACAC |
| | GTTTGGTTCTCAGAAGGTCTCAGGAACAGCTTGCCTTACCCTCTATGTACAGCCCA |
| | TAGTACACCTTCACTACAACTATTTTGAAGACCACCTAAACATCACTTGCTCTGCG |
| | ACTGCCCGTCCAGCCCCTGCCATCTCCTGGAAGGGTACTGGGACAGGAATTGAGAA |
| | TAGTACCGAGAGTCACTTCCATTCAAATGGGACTACATCTGTCACCAGCATCCTCC |
| | GGGTCAAAGACCCCAAAACTCAAGTTGGGAAGGAAGTGATCTGCCAGGTTTTATAC |
| | CTGGGGAATGTGATTGACTACAAGCAGAGTCTGGACAAAGGATTTTGGTTTTCAGT |
| | TCCACTGTTGCTAAGCATTGTTTCTCTGGTAATTCTTCTGATCTTGATCTCCATCT |
| | TACTATACTGGAAACGTCACCGAAATCAGGAGCGGGGTGAATCATCACAGGGGATG |
| | CAAAGAATGAAATAAGAGCTCTAAAGAAATTATACAGAACCCTGAACGTGTTTCCC |
| | TGGTCTACTTGAATCTGATGTGAAAGAAAAGCAGGAGGGAAAAGGCCATTCTCCAT |
| | AGGACCTAAGGAGAGCAAAAGACCAGACACGAGCCTGTGAGGGATTTGACTTTTTG |
| | CTGTTGTCCCAGGTCCTCGGTGTTTGCATTCCAAGAGGAAGTCGAGTGCCTCGGGT |
| | CTGTTGTAGGACTTGATTTTTTTTTTTTTTGTAGAGCAATGCAGTGCCATGCTGTT |
| | AGAAAGGCTCCAGACTTAGAACCACCAGTGCCAAGCCAGCTCTCAGACCGACTAGG |
| | GCTCCCATCGGAGGAACAAATCGTAGTCAACTTACCTCACAGAGCTCTCTGGTCCT |
| | TACACAAAGTAGAAAGGAGTGGGACCAGAAAATTGGCCATGTCTGAAATCTGATGG |
| | AATTTTTAGGAAGAAAACTGAAGAATAAGCAAAAGAAGAAAGAACACAGAAGGGTC |
| | CAAAGAGCTTCTGAGAGTACCTTTTGCCTTTCTGTTGGTGTCCCAGCTCTGGTTTT |
| | GTTCTTAGGTCCGCCAGTGTGTTTCCCTGTTGTTTGAGTATCTAGTTGACTACCTG |
| | CTACTGTTCTGCTGATGGTTGGCCTTGCTAGAATCCCTGACTCCCCTGCCGTTCTC |
| | TATGTGCTTCTATGAGGGTTACTATGATGAAAATAGAGCAGAAGATAGTGTGAAGT |
| | AACATTGGCAACTGTAATGTGTCCATTTAACTTATTTTTATAGCACTTAGGCAATA |
| | TTGTTAGTCTTAGTGAGTAGTTCACATCTTTACAAAAGCATGCTCTCCCTATCCAT |
| | TGGGCCCACAATAACACTCTCTTTGAGGCCATTCTGAATCCTGTCTCGTGTAATGA |
| | TAATATATTATGAAAACAGATACTTTAAGAATTTCCTGTACAGCAGTCAGTTGTTT |
| | ATTCTCTCTCTCTCTCTCTCTCTCTCTCTCCCTCCCCCACCCCAGCTTCTTTTTCT |
| | GTGACTTTGTTTTTCATAAAGAGAAGGCATCTCCTGAATACAATCGCTTTGTTCTG |
| | AAGACATCGTGAACTATTAATTCTTAACCCTTTGACAAAACTAGTGAAGTTGTTTT |
| | CTGTATCTTTTGCTTCATCTGTCTTTATAGAGTGACCTAGGAATTCAAGTGTAAGT |
| | TGTTTCCATTGTTGAACTGGATATTTATATACTTGGTATGCTTTTCACGTGTTATT |
| | TAATTCTGTATAATTTCCTATATTTGTATTAAAATATTGAGCAATTAAAAGTGTCA |
| | ACTAAATATTTGATGTGGCATTCCCTTGAGAAATATAGAAATAAAGAATAAAAAAA |
| | AAAAAAAAAAA (SEQ ID NO: 27) |
| | >NP_034948.3 OX-2 membrane glycoprotein isoform 1 |
| | precursor [Mus musculus] |
| | MGSLVFRRPFCHLSTYSLIWGMAAVALSTAQVEVVTQDERKALHTTASLRCSLKTS |
| | QEPLIVTWQKKKAVSPENMVTYSKTHGVVIQPAYKDRINVTELGLWNSSITFWNTT |
| | LEDEGCYMCLFNTFGSQKVSGTACLTLYVQPIVHLHYNYFEDHLNITCSATARPAP |
| | AISWKGTGTGIENSTESHFHSNGTTSVTSILRVKDPKTQVGKEVICQVLYLGNVID |
| | YKQSLDKGFWFSVPLLLSIVSLVILLILISILLYWKRHRNQERGESSQGMQRMK |
| | (SEQ ID NO: 28) |
| Human | >NM_009587.3 Homo sapiens galectin 9 (LGALS9), transcript |
| Galectin-9 | variant 1, mRNA |
| | CTTTGTTAAGTCGTTCCCTCTACAAAGGACTTCCTAGTGGGTGTGAAAGGCAGCGG |
| | TGGCCACAGAGGCGGCGGAGAGATGGCCTTCAGCGGTTCCCAGGCTCCCTACCTGA |
| | GTCCAGCTGTCCCCTTTTCTGGGACTATTCAAGGAGGTCTCCAGGACGGACTTCAG |
| | ATCACTGTCAATGGGACCGTTCTCAGCTCCAGTGGAACCAGGTTTGCTGTGAACTT |
| | TCAGACTGGCTTCAGTGGAAATGACATTGCCTTCCACTTCAACCCTCGGTTTGAAG |
| | ATGGAGGGTACGTGGTGTGCAACACGAGGCAGAACGGAAGCTGGGGGCCCGAGGAG |
| | AGGAAGACACACATGCCTTTCCAGAAGGGGATGCCCTTTGACCTCTGCTTCCTGGT |
| | GCAGAGCTCAGATTTCAAGGTGATGGTGAACGGGATCCTCTTCGTGCAGTACTTCC |
| | ACCGCGTGCCCTTCCACCGTGTGGACACCATCTCCGTCAATGGCTCTGTGCAGCTG |
| | TCCTACATCAGCTTCCAGAACCCCCGCACAGTCCCTGTTCAGCCTGCCTTCTCCAC |
| | GGTGCCGTTCTCCCAGCCTGTCTGTTTCCCACCCAGGCCCAGGGGGCGCAGACAAA |
| | AACCTCCCGGCGTGTGGCCTGCCAACCCGGCTCCCATTACCCAGACAGTCATCCAC |
| | ACAGTGCAGAGCGCCCCTGGACAGATGTTCTCTACTCCCGCCATCCCACCTATGAT |
| | GTACCCCCACCCCGCCTATCCGATGCCTTTCATCACCACCATTCTGGGAGGGCTGT |
| | ACCCATCCAAGTCCATCCTCCTGTCAGGCACTGTCCTGCCCAGTGCTCAGAGGTTC |
| | CACATCAACCTGTGCTCTGGGAACCACATCGCCTTCCACCTGAACCCCCGTTTTGA |
| | TGAGAATGCTGTGGTCCGCAACACCCAGATCGACAACTCCTGGGGGTCTGAGGAGC |
| | GAAGTCTGCCCCGAAAAATGCCCTTCGTCCGTGGCCAGAGCTTCTCAGTGTGGATC |
| | TTGTGTGAAGCTCACTGCCTCAAGGTGGCCGTGGATGGTCAGCACCTGTTTGAATA |
| | CTACCATCGCCTGAGGAACCTGCCCACCATCAACAGACTGGAAGTGGGGGGCGACA |
| | TCCAGCTGACCCATGTGCAGACATAGGCGGCTTCCTGGCCCTGGGGCCGGGGGCTG |
| | GGGTGTGGGGCAGTCTGGGTCCTCTCATCATCCCCACTTCCCAGGCCCAGCCTTTC |
| | CAACCCTGCCTGGGATCTGGGCTTTAATGCAGAGGCCATGTCCTTGTCTGGTCCTG |
| | CTTCTGGCTACAGCCACCCTGGAACGGAGAAGGCAGCTGACGGGGATTGCCTTCCT |
| | CAGCCGCAGCAGCACCTGGGGCTCCAGCTGCTGGAATCCTACCATCCCAGGAGGCA |
| | GGCACAGCCAGGGAGAGGGGAGGAGTGGGCAGTGAAGATGAAGCCCCATGCTCAGT |
| | CCCCTCCCATCCCCCACGCAGCTCCACCCCAGTCCCAAGCCACCAGCTGTCTGCTC |
| | CTGGTGGGAGGTGGCCTCCTCAGCCCCTCCTCTCTGACCTTTAACCTCACTCTCAC |
| | CTTGCACCGTGCACCAACCCTTCACCCCTCCTGGAAAGCAGGCCTGATGGCTTCCC |
| | ACTGGCCTCCACCACCTGACCAGAGTGTTCTCTTCAGAGGACTGGCTCCTTTCCCA |
| | GTGTCCTTAAAATAAAGAAATGAAAATGCTTGTTGGCACATTCA (SEQ ID NO: |
| | 29) |
| | >NP_033665.1 galectin-9 isoform long [Homo sapiens] |
| | MAFSGSQAPYLSPAVPFSGTIQGGLQDGLQITVNGTVLSSSGTRFAVNFQTGFSGN |
| | DIAFHFNPRFEDGGYVVCNTRQNGSWGPEERKTHMPFQKGMPFDLCFLVQSSDFKV |
| | MVNGILFVQYFHRVPFHRVDTISVNGSVQLSYISFQNPRTVPVQPAFSTVPFSQPV |
| | CFPPRPRGRRQKPPGVWPANPAPITQTVIHTVQSAPGQMFSTPAIPPMMYPHPAYP |
| | MPFITTILGGLYPSKSILLSGTVLPSAQRFHINLCSGNHIAFHLNPRFDENAVVRN |
| | TQIDNSWGSEERSLPRKMPFVRGQSFSVWILCEAHCLKVAVDGQHLFEYYHRLRNL |
| | PTINRLEVGGDIQLTHVQT (SEQ ID NO: 30) |
| Mouse | >NM_010708.2 Mus musculus lectin, galactose binding, |
| Galectin-9 | soluble 9 (Lgals9), transcript variant 1, mRNA |
| | GCCAAATAGCTGTGGTTTCTGTTTCCTAGCTCAGCCCTGCCCTGCGCAGAGTTCTG |
| | TCGTCCACCATCGAGTGAGGAAGAGAGCATTGGTTCCCCTGAGATAGAAGAGATGG |
| | CTCTCTTCAGTGCCCAGTCTCCATACATTAACCCGATCATCCCCTTTACTGGACCA |
| | ATCCAAGGAGGGCTGCAGGAGGGACTTCAGGTGACCCTCCAGGGGACTACCAAGAG |
| | TTTTGCACAAAGGTTTGTGGTGAACTTTCAGAACAGCTTCAATGGAAATGACATTG |
| | CCTTCCACTTCAACCCCCGGTTTGAGGAAGGAGGGTATGTGGTTTGCAACACGAAG |
| | CAGAACGGACAGTGGGGTCCTGAGGAGAGAAAGATGCAGATGCCCTTCCAGAAGGG |
| | GATGCCCTTTGAGCTTTGCTTCCTGGTGCAGAGGTCAGAGTTCAAGGTGATGGTGA |
| | ACAAGAAATTCTTTGTGCAGTACCAACACCGCGTACCCTACCACCTCGTGGACACC |
| | ATCGCTGTCTCCGGCTGCTTGAAGCTGTCCTTTATCACCTTCCAGAACTCTGCAGC |
| | CCCTGTCCAGCATGTCTTCTCCACAGTGCAGTTCTCTCAGCCAGTCCAGTTCCCAC |
| | GGACCCCTAAGGGGCGCAAACAGAAAACTCAGAACTTTCGTCCTGCCCACCAGGCA |
| | CCCATGGCTCAAACTACCATCCATATGGTTCACAGCACCCCTGGACAGATGTTCTC |
| | TACTCCTGGAATCCCTCCTGTGGTGTACCCCACCCCAGCCTATACCATACCTTTCT |
| | ACACCCCCATTCCAAATGGGCTTTACCCGTCCAAGTCCATCATGATATCAGGCAAT |
| | GTCTTGCCAGATGCTACGAGGTTCCATATCAACCTTCGCTGTGGAGGTGACATTGC |
| | TTTCCACCTGAACCCCCGTTTCAATGAGAATGCTGTTGTCCGAAACACTCAGATCA |
| | ACAACTCCTGGGGGCAGGAAGAGCGAAGTCTGCTTGGGAGGATGCCCTTCAGTCGA |
| | GGCCAGAGCTTCTCGGTGTGGATCATATGTGAAGGTCACTGCTTCAAGGTAGCTGT |
| | GAATGGTCAACACATGTGTGAATATTACCACCGCCTGAAGAACTTGCAGGATATCA |
| | ACACTCTAGAAGTGGCGGGTGATATCCAGCTGACCCACGTGCAGACATAGGCAAGG |
| | TCTCTGGCCTAGGGATAAGGGCTGGAGCACTCTGCCTGTGTCTTATCTTTCCCCTG |
| | TCTCAGCCCTGGCACCATCAGAAGAGATCATCACTTATAGGAATTCCAGGAAGGTG |
| | AAATTCCCAATTGACTCCCTCCACAAAGGGGGTTTTCTAGGCTGTGTGGCACATGG |
| | CTGTCAGCCCATAGTCTGAGCCATTGCCCCCAAGCTAGCTATATACTGAGGGAAGT |
| | GACCCTCCTGGGTTTGCTCAGATCTCTGATCGTTCCCCCCTCTGTGGCCCTTTTCT |
| | TTCACCCCTCCAGGAGAGCCACCCTGATATCATCCCACTGGCCTCCAACTGACCCA |
| | CAATGTCCACAGTAACTTTCCCCCATTCTCACCCAGTATCCATAAAATAAAGAAAT |
| | AATATTGCTTGTCTACAC (SEQ ID NO: 31) |
| | >NP_034838.2 galectin-9 isoform 1 [Mus musculus] |
| | MALFSAQSPYINPIIPFTGPIQGGLQEGLQVTLQGTTKSFAQRFVVNFQNSFNGND |
| | IAFHFNPRFEEGGYVVCNTKQNGQWGPEERKMQMPFQKGMPFELCFLVQRSEFKVM |
| | VNKKFFVQYQHRVPYHLVDTIAVSGCLKLSFITFQNSAAPVQHVFSTVQFSQPVQF |
| | PRTPKGRKQKTQNFRPAHQAPMAQTTIHMVHSTPGQMFSTPGIPPVVYPTPAYTIP |
| | FYTPIPNGLYPSKSIMISGNVLPDATRFHINLRCGGDIAFHLNPRFNENAVVRNTQ |
| | INNSWGQEERSLLGRMPFSRGQSFSVWIICEGHCFKVAVNGQHMCEYYHRLKNLQD |
| | INTLEVAGDIQLTHVQT (SEQ ID NO: 32) |
| Human PVR | >NM_006505.5 Homo sapiens PVR cell adhesion molecule |
| (CD155) | transcript variant 1, mRNA |
| | AGTCACTTGTCTGGAGCTTGAAGAAGTGGGTATTCCCCTTCCCACCCCAGGCACTG |
| | GAGGAGCGGCCCCCCGGGGATTCCAGGACCTGAGCTCCGGGAGCTGGACTCGCAGC |
| | GACCGCGGCAGAGCGAGCGGGCGCCGGGAAGCGAGGAGACGCCCGCGGGAGGCCCA |
| | GCTGCTCGGAGCAACTGGCATGGCCCGAGCCATGGCCGCCGCGTGGCCGCTGCTGC |
| | TGGTGGCGCTACTGGTGCTGTCCTGGCCACCCCCAGGAACCGGGGACGTCGTCGTG |
| | CAGGCGCCCACCCAGGTGCCCGGCTTCTTGGGCGACTCCGTGACGCTGCCCTGCTA |
| | CCTACAGGTGCCCAACATGGAGGTGACGCATGTGTCACAGCTGACTTGGGCGCGGC |
| | ATGGTGAATCTGGCAGCATGGCCGTCTTCCACCAAACGCAGGGCCCCAGCTATTCG |
| | GAGTCCAAACGGCTGGAATTCGTGGCAGCCAGACTGGGCGCGGAGCTGCGGAATGC |
| | CTCGCTGAGGATGTTCGGGTTGCGCGTAGAGGATGAAGGCAACTACACCTGCCTGT |
| | TCGTCACGTTCCCGCAGGGCAGCAGGAGCGTGGATATCTGGCTCCGAGTGCTTGCC |
| | AAGCCCCAGAACACAGCTGAGGTTCAGAAGGTCCAGCTCACTGGAGAGCCAGTGCC |
| | CATGGCCCGCTGCGTCTCCACAGGGGGTCGCCCGCCAGCCCAAATCACCTGGCACT |
| | CAGACCTGGGCGGGATGCCCAATACGAGCCAGGTGCCAGGGTTCCTGTCTGGCACA |
| | GTCACTGTCACCAGCCTCTGGATATTGGTGCCCTCAAGCCAGGTGGACGGCAAGAA |
| | TGTGACCTGCAAGGTGGAGCACGAGAGCTTTGAGAAGCCTCAGCTGCTGACTGTGA |
| | ACCTCACCGTGTACTACCCCCCAGAGGTATCCATCTCTGGCTATGATAACAACTGG |
| | TACCTTGGCCAGAATGAGGCCACCCTGACCTGCGATGCTCGCAGCAACCCAGAGCC |
| | CACAGGCTATAATTGGAGCACGACCATGGGTCCCCTGCCACCCTTTGCTGTGGCCC |
| | AGGGCGCCCAGCTCCTGATCCGTCCTGTGGACAAACCAATCAACACAACTTTAATC |
| | TGCAACGTCACCAATGCCCTAGGAGCTCGCCAGGCAGAACTGACCGTCCAGGTCAA |
| | AGAGGGACCTCCCAGTGAGCACTCAGGCATGTCCCGTAACGCCATCATCTTCCTGG |
| | TTCTGGGAATCCTGGTTTTTCTGATCCTGCTGGGGATCGGGATTTATTTCTATTGG |
| | TCCAAATGTTCCCGTGAGGTCCTTTGGCACTGTCATCTGTGTCCCTCGAGTACAGA |
| | GCATGCCAGCGCCTCAGCTAATGGGCATGTCTCCTATTCAGCTGTGAGCAGAGAGA |
| | ACAGCTCTTCCCAGGATCCACAGACAGAGGGCACAAGGTGACAGCGTCGGGACTGA |
| | GAGGGGAGAGAGACTGGAGCTGGCAAGGACGTGGGCCTCCAGAGTTGGACCCGACC |
| | CCAATGGATGAAGACCCCCTCCAAAGAGACCAGCCTCCCTCCCTGTGCCAGACCTC |
| | AAAACGACGGGGGCAGGTGCAAGTTCATAGGTCTCCAAGACCACCCTCCTTTCATT |
| | TGCTAGAAGGACTCACTAGACTCAGGAAAGCTGTTAGGCTCACAGTTACAGTTTAT |
| | TACAGTAAAAGGACAGAGATTAAGATCAGCAAAGGGAGGAGGTGCACAGCACACGT |
| | TCCACGACAGATGAGGCGACGGCTTCCATCTGCCCTCTCCCAGTGGAGCCATATAG |
| | GCAGCACCTGATTCTCACAGCAACATGTGACAACATGCAAGAAGTACTGCCAATAC |
| | TGCCAACCAGAGCAGCTCACTCGAGATCTTTGTGTCCAGAGTTTTTTGTTTGTCTT |
| | GAGACAGGGTCTGGCTCTGTTGGCAGACTAGAGTACAGTGGTGAGATCACAGTTCA |
| | TTGCAGCCTTGACTTCTCAACGCCAAGTCATCCTCCCACCTCAGCCTCCTGAGTAG |
| | CTATGACTACAGGTATGTGCCACCACGTCTGGCTAATCTTTTTATTATTTGTAAAG |
| | TCGAGGTTTCCCTGTGTTGCCCAGGCTGGTCTTGAACTCTTGGCTCCAAGTGATAC |
| | TTCTGCCTTGGCCTCCCAAAGTGCTGAATTAAGCAGCTCACCATCCACACGGCTGA |
| | CCTCATACATCAAGCCAATACCGTGTGGCCCAAGACCCCCACCATAAATCACATCA |
| | TTAGCATGAACCACCCAGAGTGGCCCAAGACTCCAAGATCAGCTACCAGGCAGGAT |
| | ATTCCAAGGGCTTAGAGATGAATGCCCAGGAGCTGAGGATAAAGGGCCCGATCTTT |
| | CTTTGGGCAAGGTTAAGCCTTTACTGCATAGCAGACCACACAGAAGGGTGTGGGCC |
| | ACCAGAGAATTTTGGTAAAAATTTGGCCTCTGGCCTTGAGCTTCTAAATCTCTGTA |
| | TCCGTCAGATCTCTGTGGTTACAAGAAACAGCCACTGACCCTGGTCACCAGAGGCT |
| | GCAATTCAGGCCGCAAGCAGCTGCCTGGGGGGTGTCCAAGGAGCAGAGAAAACTAC |
| | TAGATGTGAACTTGAAGAAGGTTGTCAGCTGCAGCCACTTTCTGCCAGCATCTGCA |
| | GCCACTTTCTGCCAGCATCTGCAGCCAGCAAGCTGGGACTGGCAGGAAATAACCCA |
| | CAAAAGAAGCAAATGCAATTTCCAACACAAGGGGGAAGGGATGCAGGGGGAGGCAG |
| | CGCTGCAGTTGCTCAGGACACGCTCCTATAGGACCAAGATGGATGCGACCCAAGAC |
| | CCAGGAGGCCCAGCTGCTCAGTGCAACTGACAAGTTAAAAAGGTCTATGATCTTGA |
| | GGGCAGACAGCAGAATTCCTCTTATAAAGAAAACTGTTTGGGAAAATACGTTGAGG |
| | GAGAGAAGACCTTGGGCCAAGATGCTAAATGGGAATGCAAAGCTTGAGCTGCTCTG |
| | CAAGAGAAAATAAGCAGGACAGAGGATTTGCTCTGGACAGAGATGGAAGAGCCGGG |
| | AACAGAGAAGTGTGGGGAAGAGATAGGAACCAGCAGGATGGCAGGGGCAAAGGGCT |
| | CAAGGGTGAGGAGGCCAGTGGGACCCCACAGAGTTGGGGAGATAAAGGAACATTGG |
| | TTGCTTTGGTGGCACGTAAGCTCCTTGTCTGTCTCCAGCACCCAGAATCTCATTAA |
| | AGCTTATTTATTGTACCTCCAGCGGCTGTGTGCAATGGGGTCTTTTGTGGAAATCA |
| | AGGAGCAGACAGGTTTCATGTGTACTGTCACCACGTGGGATGGAACCAGAGGCATG |
| | GAAGCAAGACGCTAAATGAAGAGGGCCATAAGGGCTGGGATTCCCAGGCACCTTAG |
| | GAACAGCTTGTCTTTTTTTTTTTCCTCTCCAAAAAAAATGTTTAAGGGACGGTGTC |
| | TCCTGTCACCCAGGCTGGAGTGCAATGGCACGATCATAGCTCATTGCAGCCTCTAA |
| | CTCCGGGGCTCAAGCAATCCTCCCACCTCAGCCTACCAAGTAGCTGTGACCACAGC |
| | TGCCCCTCACCATGCTAAGCTAATTTTTTTAATTAGATAGTACATAAACGTCCCAA |
| | AATTAGAAGATAAAAAGACATGAGGGATCCATTCTAATTTGTGTTTGGAGTGTAAT |
| | GGTCCAGCTCCATTCTTCTGCACATGGATATCCAGTTTTACACAACACTGTGAATG |
| | TAATGAATGCCACTGAATCATACACTCAAAAATAGCTAAAATGGCAAATTGTCTGT |
| | TATCTCTTTTTAACCACCATTTTTGAAAATTAATTATACCAAAAAACCATTGAATA |
| | GTGCACTTTATTTATTTATTTATTTGTTTATTTATTTATTTATTTTAGAAATAAGA |
| | GTCTCACTTTGTTGCCCAGGCTGGAGTGCAGTGGCGTGATCATGGCTCATTGCAGC |
| | CTCGACCTGCTGGGCTCGGGCTATCCTTCCATCTCAGCCTCCCGAGTAGCTGGGAC |
| | TATAGGTGGGCGCCACCCCACCTGGCTAAATCTCTTTTTAACTTTTGTAGAGATAG |
| | GCATCTCGCTATGTTGCCTAGGCTGGGCTGGAACTCCTGGGCTCAAGTGCTCCTCC |
| | TGCCTTGGCCTCCCAAAGCGCTAGGATTACAGATGTGAGCCACCGCGCCCACCCTG |
| | AACCTTACTTTTTTTGCTCAGTTTCTGGTAATTCAGAGAATGCCTCCTGAGTTGTT |
| | CTACACCCACCTCATATTCCATGGGAGGGCTGTACAGGGCTTTTTTAACGAGGCCT |
| | CTAAGGACAGGCATTTGTATCCTTTCCAGCCTTTCACTATTACAATGTTGTAGTGA |
| | ATAACTTTACACACTGTCATTTATTTTACTTTTTTTTTTTTTTATTTTAGAGAAAG |
| | GAATCTTGCCATCTTGCCCAGGCTGGTCTCAAATTCCTGGGCCCAAACAATCCTCC |
| | CGCCTTGGCCTCCTAAAGTACTGGGATTTATAGGCATAAGCCACCGTGCCTGGCCA |
| | ATGCACACTGTCATTTAGCTCATGTTAACACCTGAGTGTAGGACACACTCCTGGAG |
| | GTGGAATTGCTGGGCCAAAGAGTATGTTTCTTGTCATTGTGATAGATATTGACAAA |
| | TGAACCCTCACAGAAGTTGTGCTGAGTTCTGTTCCCACCAGCGACGTAGGCGATGA |
| | CCTTTTTCTGGAGGGAGGGGGCATCCTTGGAGTCCACAGAGCCAGGAATGGAGAGT |
| | GGGCCCAGAATTTTGGTATAGGTGTTGTATAAACTTATAGTAAGGTTAAGAAAACC |
| | GCAACTATCCTTATCAGAGACTTGGCGGGGGGCAGGGTATGATGGAGATCATAAGG |
| | AGGCTAAAACACTCCACACCCTCCCTCTGCATTGCTCCTGCACGGGAGTCGGGAAT |
| | CTTTTCAGGTTGATACGATCTCACCTTGAGGAGCTGTGAGGTCCCAGAAGCCTCTG |
| | GGTTGCAGATTGCTTGGGGTGAAAATGTCTGTGCTACTGAAATCTAACTTTTTACA |
| | AAAAATTACGGGCTGGGCGCAGTGGCTCACGCCTGTAATCCCAGCACTTTGGGAGG |
| | CTGCAGCGGGTGGATCACTTGAGGTAAGGAGTTCAAGACCAGACCATAGTGAAACC |
| | GTGTCTCTACAAAAAAAATTAGCCAGGTGTGGTGGTGCATGCTTGTAATCCCAGCT |
| | ACTCAGAAGGCTGAGGTGGGAGAATCCCTTGAACCCGGGAAGTGGAGGCTGGAGTA |
| | AACCATGATCGAGTTACTGCACTCCAGCCTGGGTGACAAGAGTGAGACTCTGTCTC |
| | CAAAAAAAAAAAAAAAAAAAAAAAAACTGGATTGCCTGGCTCTACTCCGGGCACAG |
| | CATGCAGGCCCAGTTCTGCTGCTCTGCTGTTTGTTCTGCTTTCCTCCACATATTGG |
| | CATCACCCTCTGGTGCCAAGATGGCTGCTGCATTCCAGGCATCACATCCAGACTCA |
| | GACCCAGAGAAGCTGCCCATCCCTACCTGGGTGAGCCTTTGTAGGAACGAGAAACC |
| | GCATCCAGCAGCAGAAACCTCACCCAGCAGCGTCTTTTCCGGTCTCATTCACCAGC |
| | GCCGCCCACCGCTCAACCAATCCCTGGCCAAAAGAATGGGACCGCCTGGAAGGCTG |
| | GACCAAACAGGACCTGCCCTCTGGGGCTGGGGAGAGGCCCAGATGAAGGCTGCAGG |
| | ACAGGATGGACTCCTAGACCTCTGTTACCAGCAGTGACTACCTCTGTCTGGGTGGT |
| | TGGAACATGTTTGAATTTTATTCTAAGTACTGTCTACAAGTTCTGCAATAAACCTT |
| | GACTCTTCTTTTAATAATGCAAAA (SEQ ID NO: 33) |
| | >NP_006496.4 poliovirus receptor isoform alpha precursor |
| | [Homo sapiens] |
| | MARAMAAAWPLLLVALLVLSWPPPGTGDVVVQAPTQVPGFLGDSVTLPCYLQVPNM |
| | EVTHVSQLTWARHGESGSMAVFHQTQGPSYSESKRLEFVAARLGAELRNASLRMFG |
| | LRVEDEGNYTCLFVTFPQGSRSVDIWLRVLAKPQNTAEVQKVQLTGEPVPMARCVS |
| | TGGRPPAQITWHSDLGGMPNTSQVPGFLSGTVTVTSLWILVPSSQVDGKNVTCKVE |
| | HESFEKPQLLTVNLTVYYPPEVSISGYDNNWYLGQNEATLTCDARSNPEPTGYNWS |
| | TTMGPLPPFAVAQGAQLLIRPVDKPINTTLICNVTNALGARQAELTVQVKEGPPSE |
| | HSGMSRNATIFLVLGILVFLILLGTGIYFYWSKCSREVLWHCHLCPSSTEHASASA |
| | NGHVSYSAVSRENSSSQDPQTEGTR (SEQ ID NO: 34) |
| Mouse PVR | >NM_027514.2 Mus musculus poliovirus receptor (Pvr), mRNA |
| (CD155) | AGGCGGCACCCGCTTAGCTGAGATTCCAGCACTTGACTTCAGGGTTTCGGAGAGAT |
| | AAGGCGCTTGGCCGTTACTAACTGGACTACAAAGAGCTGGATCGGACCGGAACCAC |
| | ATGGCTCAACTCGCCCGAGCCACCCGCTCCCCGCTGTCATGGCTGCTGCTGCTGTT |
| | CTGCTATGCACTCCGGAAAGCGGGTGGGGATATACGTGTGCTGGTGCCCTACAATT |
| | CGACAGGCGTCTTGGGAGGGTCGACCACCTTGCACTGTAGTCTGACTTCTAATGAG |
| | AATGTGACTATCACTCAAATAACCTGGATGAAGAAGGATTCAGGTGGATCCCACGC |
| | TCTTGTGGCTGTCTTCCACCCCAAGAAGGGGCCCAACATCAAAGAGCCAGAGAGGG |
| | TGAAATTCTTGGCTGCCCAACAGGATCTGAGGAACGCATCTCTGGCCATCTCGAAC |
| | TTAAGTGTAGAAGACGAAGGCATCTATGAATGTCAGATTGCCACATTCCCCAGAGG |
| | CAGTAGAAGCACCAATGCCTGGCTGAAGGTGCAAGCCCGACCTAAGAACACTGCAG |
| | AGGCCCTGGAGCCCTCTCCCACCTTGATACTGCAGGATGTGGCTAAATGCATCTCT |
| | GCCAATGGTCACCCTCCTGGACGAATCTCTTGGCCCTCGAATGTGAATGGAAGTCA |
| | CCGTGAAATGAAGGAACCAGGGTCCCAGCCGGGCACCACCACAGTTACCAGCTACC |
| | TCTCCATGGTACCTTCTCGCCAGGCAGACGGCAAGAACATCACCTGCACGGTGGAG |
| | CATGAAAGCTTACAGGAGCTGGACCAGCTGCTGGTGACCCTTTCCCAACCCTATCC |
| | ACCTGAAAACGTGTCCATCTCTGGCTATGACGGCAACTGGTATGTTGGCCTCACTA |
| | ACTTGACCCTGACCTGTGAAGCTCACAGCAAACCAGCGCCTGACATGGCTGGATAT |
| | AACTGGAGCACGAACACGGGTGACTTTCCCAACTCTGTTAAGCGCCAGGGCAATAT |
| | GCTTCTAATCTCCACCGTAGAGGATGGTCTCAATAACACGGTCATTGTGTGCGAAG |
| | TCACCAATGCCCTAGGGTCTGGGCAGGGCCAAGTGCACATCATTGTTAAAGAGAAA |
| | CCTGAGAATATGCAGCAAAATACAAGATTACACCTAGGCTACATCTTTCTTATCGT |
| | CTTTGTCCTCGCTGTAGTCATCATCATCGCAGCACTATACACTATACGAAGATGCA |
| | GGCATGGTCGTGCTCTGCAGTCCAATCCCTCAGAGAGGGAGAACGTCCAGTATTCA |
| | TCTGTGAACGGCGACTGTAGACTGAACATGGAGCCAAACAGCACAAGGTGACGGTG |
| | CTGGGTAGACAGAACTAAGGAACTTGAAGGCATAGCAACTGGAACCCTACTCTCAT |
| | AAATGAAGAAGCCTCCAGAGAGACTGGCTGCTCAGTGTGATGAGCATAGCAAGTTT |
| | GGGGGGTCTCCCAGGATGCTGCCGAATTCCACGTTGTCAAAAGGACCCATGGAGGC |
| | CAGTGTGTTGGCTCACTCTTGACATCTCAGCAAGCTGGGGGGGGGGGGGGGAGCAT |
| | AAAGCAAGGTTGAGTCTAGCTTGGGCTATAGAGCAAAGCCCTGTCCATACACAAAC |
| | AAGCTAAGGGGCTTTGAGACGGTCAGAAACTGAAGTCTTGCTTTGGGTAAGGTAAA |
| | TCCTCTACCGCATGTATGTGCTAGACTTGAAAGACTTCCACACAGACCTCTTTATA |
| | AGTTGACTCCATTGGGGCTATCCCCTCCTCTCTGGACAAGGTCTCTGTATGTAGCC |
| | AAGGCTAGGCTCAAACTCACAGAGATATGTCTGCTTCTACCTCCCCAGTGCTAGAG |
| | TTGAAAGTATTTGTGCCACTGCACTTTTCTAGGTCTTCTTTTAATGAAGTAAAGTA |
| | TATATTTATAAAAAGCTATTTAGTTATATATATATATATTTTTGAGACTATTTCAT |
| | AGAGCCCAAGCTAACCTCAAACTTACTATGTAGCCAAGAGTGATGGTAAACTAATT |
| | TATTTTAATTTATTTGTCTTCAATTTTAACCATCACCCAACCCCTGCTCCCTTCCA |
| | TATCTTCTTTCAATCCATTTCATTGTCTTTTTCTTCCCAGACACTATTCTGACTTA |
| | CGTCTCCATTACAAACATTTTATTGAACTACATAAAAATGTGTGAACCACAAAAAA |
| | AAAATGTATTTGTCAAAATTGTAGTTGTCTTTCTGAGGCTGACCTGAGTTCTCTGA |
| | TACCATTCTCTCCAGTTGTATCCAGTTTCCTGTAAACAATGTGACTTTGTTTTTCT |
| | CAGTAGCTAAAACATCCCAATTATGTGAGTGTACACTTTCTTTACTCATTCCTCTG |
| | TGGGCCACCAGCTGGGTTGGTTCCATATCTGAGCTATTGTGCATGGAATTGTCTCT |
| | GTGGTGGGTTTAGTAAACTCCCAGGAATGCCTGTACATGTTTGTAGAGGCCAGAAG |
| | AAGGCACAAAATCTTGAGCCAGGCTTACATGCACTTGTGAGTAGCCCCACATAGGT |
| | GCTAAGAACCCAGTTCAGGTCCTCTGCTGTGGGATGGTGGGCTGTGCACAGAAAGC |
| | CTGGTCCCGGTCTAGCAAAGGTCTGGAACTCCGGAGCCGGTGGGCTGTGATTTACA |
| | CCAGCATGGGATGGAAGGAGTTGGACCTCGCCTCCTGGGCACCTGGCTCCTGTCAC |
| | ATAGCTACAGCCTCCCACAGCCCCCCTATAGGGAGGTATGCAGCATCAATCACATA |
| | GTAGCTGCACTAAGCCCTCCCACATGCAAATAAGGTTTCCCCAAACTCTCAGTCCA |
| | AGCCAATGAAAAGTACCTGCTGTCAAACCCTAAATCATCCCCAAAACTCTGTAAGT |
| | CCTATCAGGGAATAAAATGTGTGTGAAAACTAAAAAAAAAAAAAAA (SEQ ID |
| | NO: 35) |
| | >NP_081790.1 poliovirus receptor precursor [Mus musculus] |
| | MAQLARATRSPLSWLLLLFCYALRKAGGDIRVLVPYNSTGVLGGSTTLHCSLTSNE |
| | NVTITQITWMKKDSGGSHALVAVFHPKKGPNIKEPERVKFLAAQQDLRNASLAISN |
| | LSVEDEGIYECQIATFPRGSRSTNAWLKVQARPKNTAEALEPSPTLILQDVAKCIS |
| | ANGHPPGRISWPSNVNGSHREMKEPGSQPGTTTVTSYLSMVPSRQADGKNITCTVE |
| | HESLQELDQLLVTLSQPYPPENVSISGYDGNWYVGLTNLTLTCEAHSKPAPDMAGY |
| | NWSTNTGDFPNSVKRQGNMLLISTVEDGLNNTVIVCEVTNALGSGQGQVHIIVKEK |
| | PENMQQNTRLHLGYIFLIVFVLAVVIIIAALYTIRRCRHGRALQSNPSERENVQYS |
| | SVNGDCRLNMEPNSTR (SEQ ID NO: 36) |
| Human | >NM_002856.3 Homo sapiens nectin cell adhesion molecule 2 |
| Nectin-2 | (NECTIN2), transcript variant alpha, mRNA |
| (CD112) | GTGACGTCAGCGGGTTCGAACCGCCGGAGCTGAGCGAGAGGCCGGGGGTGCCGAGC |
| isoform alpha | CGGGCGGGGAGAGCTGGGCCGGGAGAGCAGAACAGGGAGGCTAGAGCGCAGCGGGA |
| | ACCGGCCCGGAGCCGGAGCCGGAGCCCCACAGGCACCTACTAAACCGCCCAGCCGA |
| | TCGGCCCCCACAGAGTGGCCCGCGGGCCTCCGGCCGGGCCCAGTCCCCTCCCGGGC |
| | CCTCCATGGCCCGGGCCGCTGCCCTCCTGCCGTCGAGATCGCCGCCGACGCCGCTG |
| | CTGTGGCCGCTGCTGCTGCTGCTGCTCCTGGAAACCGGAGCCCAGGATGTGCGAGT |
| | TCAAGTGCTACCCGAGGTGCGAGGCCAGCTCGGGGGCACCGTGGAGCTGCCGTGCC |
| | ACCTGCTGCCACCTGTTCCTGGACTGTACATCTCCCTGGTGACCTGGCAGCGCCCA |
| | GATGCACCTGCGAACCACCAGAATGTGGCCGCCTTCCACCCTAAGATGGGTCCCAG |
| | CTTCCCCAGCCCGAAGCCTGGCAGCGAGCGGCTGTCCTTCGTCTCTGCCAAGCAGA |
| | GCACTGGGCAAGACACAGAGGCAGAGCTCCAGGACGCCACGCTGGCCCTCCACGGG |
| | CTCACGGTGGAGGACGAGGGCAACTACACTTGCGAGTTTGCCACCTTCCCCAAGGG |
| | GTCCGTCCGAGGGATGACCTGGCTCAGAGTCATAGCCAAGCCCAAGAACCAAGCTG |
| | AGGCCCAGAAGGTCACGTTCAGCCAGGACCCTACGACAGTGGCCCTCTGCATCTCC |
| | AAAGAGGGCCGCCCACCTGCCCGGATCTCCTGGCTCTCATCCCTGGACTGGGAAGC |
| | CAAAGAGACTCAGGTGTCAGGGACCCTGGCCGGAACTGTCACTGTCACCAGCCGCT |
| | TCACCTTGGTGCCCTCGGGCCGAGCAGATGGTGTCACGGTCACCTGCAAAGTGGAG |
| | CATGAGAGCTTCGAGGAACCAGCCCTGATACCTGTGACCCTCTCTGTACGCTACCC |
| | TCCTGAAGTGTCCATCTCCGGCTATGATGACAACTGGTACCTCGGCCGTACTGATG |
| | CCACCCTGAGCTGTGACGTCCGCAGCAACCCAGAGCCCACGGGCTATGACTGGAGC |
| | ACGACCTCAGGCACCTTCCCGACCTCCGCAGTGGCCCAGGGCTCCCAGCTGGTCAT |
| | CCACGCAGTGGACAGTCTGTTCAATACCACCTTCGTCTGCACAGTCACCAATGCCG |
| | TGGGCATGGGCCGCGCTGAGCAGGTCATCTTTGTCCGAGAAACCCCCAGGGCCTCG |
| | CCCCGAGATGTGGGCCCGCTGGTGTGGGGGGCCGTGGGGGGGACACTGCTGGTGCT |
| | GCTGCTTCTGGCTGGGGGGTCCTTGGCCTTCATCCTGCTGAGGGTGAGGAGGAGGA |
| | GGAAGAGCCCTGGAGGAGCAGGAGGAGGAGCCAGTGGCGACGGGGGATTCTACGAT |
| | CCGAAAGCTCAGGTGTTGGGAAATGGGGACCCCGTCTTCTGGACACCAGTAGTCCC |
| | TGGTCCCATGGAACCAGATGGCAAGGATGAGGAGGAGGAGGAGGAGGAAGAGAAGG |
| | CAGAGAAAGGCCTCATGTTGCCTCCACCCCCAGCACTCGAGGATGACATGGAGTCC |
| | CAGCTGGACGGCTCCCTCATCTCACGGCGGGCAGTTTATGTGTGACCTGGACACAG |
| | ACAGAGACAGAGCCAGGCCCGGCCCTCCCGCCCCCGACCTGACCACGCCGGCCTAG |
| | GGTTCCAGACTGGTTGGACTTGTTCGTCTGGACGACACTGGAGTGGAACACTGCCT |
| | CCCACTTTCTTGGGACTTGGAGGGAGGTGGAACAGCACACTGGACTTCTCCCGTCT |
| | CTAGGGCTGCATGGGGAGCCCGGGGAGCTGAGTAGTGGGGATCCAGAGAGGACCCC |
| | CGCCCCCAGAGACTTGGTTTTGGCTCCAGCCTTCCCCTGGCCCCGTGACACTCAGG |
| | AGTTAATAAATGCCTTGGAGGAAAACA (SEQ ID NO: 37) |
| | >NP_002847.1 nectin-2 isoform alpha precursor [Homo |
| | sapiens] |
| | MARAAALLPSRSPPTPLLWPLLLLLLLETGAQDVRVQVLPEVRGQLGGTVELPCHL |
| | LPPVPGLYISLVTWQRPDAPANHQNVAAFHPKMGPSFPSPKPGSERLSFVSAKQST |
| | GQDTEAELQDATLALHGLTVEDEGNYTCEFATFPKGSVRGMTWLRVIAKPKNQAEA |
| | QKVTFSQDPTTVALCISKEGRPPARISWLSSLDWEAKETQVSGTLAGTVTVTSRFT |
| | LVPSGRADGVTVTCKVEHESFEEPALIPVTLSVRYPPEVSISGYDDNWYLGRTDAT |
| | LSCDVRSNPEPTGYDWSTTSGTFPTSAVAQGSQLVIHAVDSLFNTTFVCTVTNAVG |
| | MGRAEQVIFVRETPRASPRDVGPLVWGAVGGTLLVLLLLAGGSLAFILLRVRRRRK |
| | SPGGAGGGASGDGGFYDPKAQVLGNGDPVFWTPVVPGPMEPDGKDEEEEEEEEKAE |
| | KGLMLPPPPALEDDMESQLDGSLISRRAVYV (SEQ ID NO: 38) |
| Mouse Nectin- | >NM_001159724.1 Mus musculus nectin cell adhesion molecule |
| 2 (CD112) | 2 (Nectin2), transcript variant 2, mRNA |
| isoform alpha | GAGCCCTAGGATCGGCTTGGCGAAGAGGGGCGGGGCCTGTGACGTCATGAGTCCGG |
| | CCCGCTGGAGCTAAGCGAGGGGCCGGGGGGCGCGGATCCTGAGAGCCAGGCGAGGG |
| | AAAGCTGGGCCGAACGAACTGATCCGGGGAGCCGTGAGCGGCGGAAGCCGGCCTGG |
| | AGCCGGACACTTCAGACCCCTGACTGCCCTCCCAGCCGATCGGTACACGAAGAGTG |
| | GTCCCTAGGCACCCCCTGCCCGGGCCCAGTCCCTCCCCGGGCCCCCCATGGCCCGG |
| | GCCGCAGTCCTCCCGCCGTCCAGATTGTCACCGACGCTGCCGTTGTTGCCGCTGCT |
| | ACTGCTCCTGCTTCAGGAAACAGGAGCCCAAGATGTGCGGGTACGAGTGCTTCCCG |
| | AGGTCCGGGGCCGCTTGGGAGGCACCGTGGAGTTACCGTGCCACCTGCTCCCACCC |
| | ACGACGGAGCGCGTCTCTCAGGTGACCTGGCAGCGCCTGGATGGCACAGTTGTGGC |
| | TGCTTTCCACCCATCCTTCGGAGTGGATTTCCCCAACTCTCAGTTCAGCAAGGACC |
| | GTCTGTCCTTTGTCAGAGCGAGACCAGAAACAAACGCAGACCTGCGGGATGCCACA |
| | CTGGCCTTCCGGGGACTGAGGGTAGAGGACGAGGGCAATTACACCTGCGAGTTTGC |
| | CACGTTTCCCAACGGTACCCGCAGGGGGGTGACCTGGCTCAGAGTCATAGCCCAGC |
| | CTGAGAACCACGCTGAAGCCCAGGAGGTCACAATTGGCCCCCAGTCGGTGGCTGTA |
| | GCCCGCTGTGTCTCCACTGGGGGCCGCCCCCCTGCCCGAATCACCTGGATCTCATC |
| | TCTGGGTGGAGAGGCCAAAGATACTCAGGAGCCAGGGATACAGGCTGGCACCGTCA |
| | CTATCATCAGCCGATACTCCTTGGTGCCCGTGGGCCGAGCGGATGGCGTCAAGGTC |
| | ACGTGTAGAGTGGAACACGAGAGCTTCGAAGAGCCGATCCTGCTGCCAGTGACCCT |
| | CTCTGTGCGCTACCCTCCAGAAGTATCCATCTCCGGCTATGATGACAACTGGTACC |
| | TTGGCCGCAGTGAGGCCATACTGACCTGTGATGTACGAAGCAACCCAGAGCCCACA |
| | GACTATGACTGGAGCACGACCTCGGGCGTCTTCCCAGCCTCTGCAGTGGCCCAGGG |
| | CTCTCAGCTGCTTGTCCACTCTGTGGATCGAATGGTCAACACTACCTTCATCTGTA |
| | CAGCCACCAACGCTGTGGGGACAGGCCGTGCTGAGCAGGTCATCCTGGTGCGAGAC |
| | ACCCCCCAGGCCTCCCGAGATGTGGGTCCGCTGGTGTGGGGGGCCGTGGGGGGAAC |
| | ATTGCTGGTGCTACTCCTGGCTGGGGGGTTCCTGGCCTTGATCCTGCTGAGGGGGA |
| | GGAGGAGGCGGAAGAGCCCTGGAGGAGGAGGAAATGATGGCGACAGAGGATCCTAC |
| | GATCCAAAGACTCAGGTGTTTGGGAACGGGGGTCCTGTCTTCTGGAGGTCAGCATC |
| | CCCTGAGCCCATGAGGCCAGATGGCAGGGAGGAAGATGAGGAGGAGGAGGAAGAAA |
| | TGAAGGCAGAGGAAGGTCTCATGCTACCTCCACACGAGTCACCTAAGGACGACATG |
| | GAGTCCCATCTGGATGGCTCCCTCATCTCTCGGCGGGCAGTTTACGTGTGACCCTA |
| | CGATATAGACACTGGACACATGGAAACACCAAGTTCCACCCTCACTGCCAACCACA |
| | CCAATGCCAGCCAGCAACGATGGCTAGGGACCGGTTGGACTGGTTCTTCTGGGGCA |
| | CACTGGAGTTGGAAGGGCACCGCCCCTGCTTTCAGGATAGAGGACAAGTGGAACCA |
| | CACAGACTCCTATCTTTAGGGCCTCATGGAGTAGGGGACCCCAGGAGCGCCATGGT |
| | GCACACTCAGGACTCCTCAGAGCTTGCTTTCGGCCCCAGCCTAGCCCTGGCCCCGA |
| | AACACTCAGGAGCTAATAAATGCCTTGTCGGAAAAAAAAAAAAAAAAAA (SEQ ID |
| | NO: 39) |
| | >NP_001153196.1 nectin-2 isoform 2 precursor [Mus |
| | musculus] |
| | MARAAVLPPSRLSPTLPLLPLLLLLLQETGAQDVRVRVLPEVRGRLGGTVELPCHL |
| | LPPTTERVSQVTWQRLDGTVVAAFHPSFGVDFPNSQFSKDRLSFVRARPETNADLR |
| | DATLAFRGLRVEDEGNYTCEFATFPNGTRRGVTWLRVIAQPENHAEAQEVTIGPQS |
| | VAVARCVSTGGRPPARITWISSLGGEAKDTQEPGIQAGTVTIISRYSLVPVGRADG |
| | VKVTCRVEHESFEEPILLPVTLSVRYPPEVSISGYDDNWYLGRSEAILTCDVRSNP |
| | EPTDYDWSTTSGVFPASAVAQGSQLLVHSVDRMVNTTFICTATNAVGTGRAEQVIL |
| | VRDTPQASRDVGPLVWGAVGGTLLVLLLAGGFLALILLRGRRRRKSPGGGGNDGDR |
| | GSYDPKTQVFGNGGPVFWRSASPEPMRPDGREEDEEEEEEMKAEEGLMLPPHESPK |
| | DDMESHLDGSLISRRAVYV (SEQ ID NO: 40) |
| Human | >NM_001042724.2 Homo sapiens nectin cell adhesion molecule |
| Nectin-2 | 2 (NECTIN2), transcript variant delta, mRNA |
| (CD112) | GTGACGTCAGCGGGTTCGAACCGCCGGAGCTGAGCGAGAGGCCGGGGGTGCCGAGC |
| isoform delta | CGGGCGGGGAGAGCTGGGCCGGGAGAGCAGAACAGGGAGGCTAGAGCGCAGCGGGA |
| | ACCGGCCCGGAGCCGGAGCCGGAGCCCCACAGGCACCTACTAAACCGCCCAGCCGA |
| | TCGGCCCCCACAGAGTGGCCCGCGGGCCTCCGGCCGGGCCCAGTCCCCTCCCGGGC |
| | CCTCCATGGCCCGGGCCGCTGCCCTCCTGCCGTCGAGATCGCCGCCGACGCCGCTG |
| | CTGTGGCCGCTGCTGCTGCTGCTGCTCCTGGAAACCGGAGCCCAGGATGTGCGAGT |
| | TCAAGTGCTACCCGAGGTGCGAGGCCAGCTCGGGGGCACCGTGGAGCTGCCGTGCC |
| | ACCTGCTGCCACCTGTTCCTGGACTGTACATCTCCCTGGTGACCTGGCAGCGCCCA |
| | GATGCACCTGCGAACCACCAGAATGTGGCCGCCTTCCACCCTAAGATGGGTCCCAG |
| | CTTCCCCAGCCCGAAGCCTGGCAGCGAGCGGCTGTCCTTCGTCTCTGCCAAGCAGA |
| | GCACTGGGCAAGACACAGAGGCAGAGCTCCAGGACGCCACGCTGGCCCTCCACGGG |
| | CTCACGGTGGAGGACGAGGGCAACTACACTTGCGAGTTTGCCACCTTCCCCAAGGG |
| | GTCCGTCCGAGGGATGACCTGGCTCAGAGTCATAGCCAAGCCCAAGAACCAAGCTG |
| | AGGCCCAGAAGGTCACGTTCAGCCAGGACCCTACGACAGTGGCCCTCTGCATCTCC |
| | AAAGAGGGCCGCCCACCTGCCCGGATCTCCTGGCTCTCATCCCTGGACTGGGAAGC |
| | CAAAGAGACTCAGGTGTCAGGGACCCTGGCCGGAACTGTCACTGTCACCAGCCGCT |
| | TCACCTTGGTGCCCTCGGGCCGAGCAGATGGTGTCACGGTCACCTGCAAAGTGGAG |
| | CATGAGAGCTTCGAGGAACCAGCCCTGATACCTGTGACCCTCTCTGTACGCTACCC |
| | TCCTGAAGTGTCCATCTCCGGCTATGATGACAACTGGTACCTCGGCCGTACTGATG |
| | CCACCCTGAGCTGTGACGTCCGCAGCAACCCAGAGCCCACGGGCTATGACTGGAGC |
| | ACGACCTCAGGCACCTTCCCGACCTCCGCAGTGGCCCAGGGCTCCCAGCTGGTCAT |
| | CCACGCAGTGGACAGTCTGTTCAATACCACCTTCGTCTGCACAGTCACCAATGCCG |
| | TGGGCATGGGCCGCGCTGAGCAGGTCATCTTTGTCCGAGAGACCCCCAACACAGCA |
| | GGCGCAGGGGCCACAGGCGGCATCATCGGGGGCATCATCGCCGCCATCATTGCTAC |
| | TGCTGTGGCTGCCACGGGCATCCTTATCTGCCGGCAGCAGCGGAAGGAGCAGACGC |
| | TGCAGGGGGCAGAGGAGGACGAAGACCTGGAGGGACCTCCCTCCTACAAGCCACCG |
| | ACCCCAAAAGCGAAGCTGGAGGCACAGGAGATGCCCTCCCAGCTCTTCACTCTGGG |
| | GGCCTCGGAGCACAGCCCACTCAAGACCCCCTACTTTGATGCTGGCGCCTCATGCA |
| | CTGAGCAGGAAATGCCTCGATACCATGAGCTGCCCACCTTGGAAGAACGGTCAGGA |
| | CCCTTGCACCCTGGAGCCACAAGCCTGGGGTCCCCCATCCCGGTGCCTCCAGGGCC |
| | ACCTGCTGTGGAAGACGTTTCCCTGGATCTAGAGGATGAGGAGGGGGAGGAGGAGG |
| | AAGAGTATCTGGACAAGATCAACCCCATCTATGATGCTCTGTCCTATAGCAGCCCC |
| | TCTGATTCCTACCAGGGCAAAGGCTTTGTCATGTCCCGGGCCATGTATGTGTGAGC |
| | TGCCATGCGCCTGGCGTCTCACATCTCACCTGTTGATCCCTTAGCTTTCTTGCCAA |
| | GGATCTAGTGCCCCCTGACCTCTGGCCAGGCCACTGTCAGTTAACACATATGCATT |
| | CCATTTGTGATGTCTACCTTGGTGGCTCCACTATGACCCCTAACCCATGAGCCCAG |
| | AGAAATTCACCGTGATAATGGAATCCTGGCAACCTTATCTCATGAGGCAGGAGGTG |
| | GGGAAGGTGCTTCTGCACAACCTCTGATCCCAAGGACTCCTCTCCCAGACTGTGAC |
| | CTTAGACCATACCTCTCACCCCCCAATGCCTCGACTCCCCCAAAATCACAAAGAAG |
| | ACCCTAGACCTATAATTTGTCTTCAGGTAGTAAATTCCCAATAGGTCTGCTGGAGT |
| | GGGCGCTGAGGGCTCCCTGCTGCTCAGACCTGAGCCCTCCAGGCAGCAGGGTCCCA |
| | CTTACCCCCTCCCCACCCTGTTCCCCAAAGGTGGGAAAGAGGGGATTCCCCAGCCC |
| | AAGGCAGGGTTTTCCCAGCACCCTCCTGTAAGCAGAAGTCTCAGGGTCCAGACCCT |
| | TCCCTGAGCCCCCACCCCCACCCCAATTCCTGCCTACCAAGCAAGCAGCCCCAGCC |
| | TAGGGTCAGACAGGGTGAGCCTCATACAGACTGTGCCTTGATGGCCCCAGCCTTGG |
| | GAGAAGAATTTACTGTTAACCTGGAAGACTACTGAATCATTTTACCCTTGCCCAGT |
| | GGAATAGGACCTAAACATCCCCCTTCCGGGGAAAGTGGGTCATCTGAATTGGGGGT |
| | AGCAATTGATACTGTTTTGTAAACTACATTTCCTACAAAATATGAATTTATACTTT |
| | GA (SEQ ID NO: 41) |
| | >NP_001036189.1 nectin-2 isoform delta precursor [Homo |
| | sapiens] |
| | MARAAALLPSRSPPTPLLWPLLLLLLLETGAQDVRVQVLPEVRGQLGGTVELPCHL |
| | LPPVPGLYISLVTWQRPDAPANHQNVAAFHPKMGPSFPSPKPGSERLSFVSAKQST |
| | GQDTEAELQDATLALHGLTVEDEGNYTCEFATFPKGSVRGMTWLRVIAKPKNQAEA |
| | QKVTFSQDPTTVALCISKEGRPPARISWLSSLDWEAKETQVSGTLAGTVTVTSRFT |
| | LVPSGRADGVTVTCKVEHESFEEPALIPVTLSVRYPPEVSISGYDDNWYLGRTDAT |
| | LSCDVRSNPEPTGYDWSTTSGTFPTSAVAQGSQLVIHAVDSLFNTTFVCTVTNAVG |
| | MGRAEQVIFVRETPNTAGAGATGGIIGGIIAAIIATAVAATGILICRQQRKEQTLQ |
| | GAEEDEDLEGPPSYKPPTPKAKLEAQEMPSQLFTLGASEHSPLKTPYFDAGASCTE |
| | QEMPRYHELPTLEERSGPLHPGATSLGSPIPVPPGPPAVEDVSLDLEDEEGEEEEE |
| | YLDKINPIYDALSYSSPSDSYQGKGFVMSRAMYV (SEQ ID NO: 42) |
| Mouse Nectin- | >NM_008990.3 Mus musculus nectin cell adhesion molecule 2 |
| 2 (CD112) | (Nectin2), transcript variant 1, mRNA |
| isoform beta | GAGCCCTAGGATCGGCTTGGCGAAGAGGGGCGGGGCCTGTGACGTCATGAGTCCGG |
| | CCCGCTGGAGCTAAGCGAGGGGCCGGGGGGCGCGGATCCTGAGAGCCAGGCGAGGG |
| | AAAGCTGGGCCGAACGAACTGATCCGGGGAGCCGTGAGCGGCGGAAGCCGGCCTGG |
| | AGCCGGACACTTCAGACCCCTGACTGCCCTCCCAGCCGATCGGTACACGAAGAGTG |
| | GTCCCTAGGCACCCCCTGCCCGGGCCCAGTCCCTCCCCGGGCCCCCCATGGCCCGG |
| | GCCGCAGTCCTCCCGCCGTCCAGATTGTCACCGACGCTGCCGTTGTTGCCGCTGCT |
| | ACTGCTCCTGCTTCAGGAAACAGGAGCCCAAGATGTGCGGGTACGAGTGCTTCCCG |
| | AGGTCCGGGGCCGCTTGGGAGGCACCGTGGAGTTACCGTGCCACCTGCTCCCACCC |
| | ACGACGGAGCGCGTCTCTCAGGTGACCTGGCAGCGCCTGGATGGCACAGTTGTGGC |
| | TGCTTTCCACCCATCCTTCGGAGTGGATTTCCCCAACTCTCAGTTCAGCAAGGACC |
| | GTCTGTCCTTTGTCAGAGCGAGACCAGAAACAAACGCAGACCTGCGGGATGCCACA |
| | CTGGCCTTCCGGGGACTGAGGGTAGAGGACGAGGGCAATTACACCTGCGAGTTTGC |
| | CACGTTTCCCAACGGTACCCGCAGGGGGGTGACCTGGCTCAGAGTCATAGCCCAGC |
| | CTGAGAACCACGCTGAAGCCCAGGAGGTCACAATTGGCCCCCAGTCGGTGGCTGTA |
| | GCCCGCTGTGTCTCCACTGGGGGCCGCCCCCCTGCCCGAATCACCTGGATCTCATC |
| | TCTGGGTGGAGAGGCCAAAGATACTCAGGAGCCAGGGATACAGGCTGGCACCGTCA |
| | CTATCATCAGCCGATACTCCTTGGTGCCCGTGGGCCGAGCGGATGGCGTCAAGGTC |
| | ACGTGTAGAGTGGAACACGAGAGCTTCGAAGAGCCGATCCTGCTGCCAGTGACCCT |
| | CTCTGTGCGCTACCCTCCAGAAGTATCCATCTCCGGCTATGATGACAACTGGTACC |
| | TTGGCCGCAGTGAGGCCATACTGACCTGTGATGTACGAAGCAACCCAGAGCCCACA |
| | GACTATGACTGGAGCACGACCTCGGGCGTCTTCCCAGCCTCTGCAGTGGCCCAGGG |
| | CTCTCAGCTGCTTGTCCACTCTGTGGATCGAATGGTCAACACTACCTTCATCTGTA |
| | CAGCCACCAACGCTGTGGGGACAGGCCGTGCTGAGCAGGTCATCCTGGTGCGAGAG |
| | TCACCCAGCACAGCAGGAGCAGGGGCCACTGGTGGCATCATTGGAGGTATTATCGC |
| | TGCCATCATCGCCACCGCAGTGGCTGGCACAGGCATCCTCATCTGCCGACAACAGC |
| | GGAAGGAGCAGAGGCTTCAAGCTGCGGATGAGGAAGAAGAACTGGAAGGACCTCCC |
| | TCCTATAAACCACCCACCCCGAAGGCCAAGCTGGAGGAACCAGAGATGCCCTCTCA |
| | ACTCTTCACCTTGGGGGCCTCAGAGCACAGCCCAGTGAAGACGCCATACTTTGATG |
| | CTGGTGTCTCTTGTGCTGATCAGGAGATGCCTCGGTATCACGAGCTGCCCACTCTG |
| | GAAGAGCGGTCAGGGCCCCTGCTGTTGGGGGCTACAGGCCTGGGACCTTCTCTTCT |
| | GGTGCCTCCAGGACCCAATGTTGTGGAGGGGGTTTCCCTGAGTCTCGAAGATGAGG |
| | AGGAAGATGATGAGGAGGAAGACTTCCTGGATAAAATCAACCCTATTTATGATGCC |
| | CTGTCCTACCCCAGCCCCTCTGACTCCTACCAGAGCAAAGACTTTTTTGTGTCACG |
| | GGCCATGTATGTGTGAGGGAGGCACAGGGGCTCTGACGTCTCACCTTTCACCCTTG |
| | ACCCATGAGCTTTCCACCAGTAATCTAGGACACTCTGACTTCCAGGCAGACCAGGG |
| | ACAACTATCACCCATTGCAATCCACCTGTGACTTCTTAGTGACTCCACCATGACGT |
| | CCAATCTATGATGTCTGAGGCAGGCAAACCTGCACAACTGGAAACCTGGAGATTTT |
| | TATCTCCCTTGGCAGGGAGCTCACCATATCCTTCTGCACCACCTGTGACCCCCCCC |
| | CCCCCCCCAAGGACTCCTAAGACTACGACCCTTTGACCATGCCACTCAGTATCTCA |
| | AGAACCCTTAAAGTCCCAAAGGAATCGGACCTTGCACTTGTCCTCAGGCAATAGAG |
| | TCCAACAGATATGCAAGAACGGGATCAGGGGCTCCCTGTTGCTCAGACCTGAGCCC |
| | TCCAGGCAGCAGAAGCTCACCTGATCCCTCCCCACCCTGCTCCCCAAAGGTGAAAA |
| | GGAGAGGATTCCCCAATGTAAGGTAGGACCTCCCCATCTCCACCTACTCCTGCAGG |
| | CAGGAATCTCAGGTTTCTCACACCCTCTCCTCAGCACCCAGGTTCCTGTCTCCAGA |
| | GCATGAATTCCAGGTCCAATGCTAGAGGGGAGAACCTAATGCAAGTGTGCCTTGCC |
| | ACCCCAAGTTTGGGAGACTCTGCTCTTATCCTGAGGACTACTGAATTCTTTTAACC |
| | CCTACCCAGTGAGATGAGAACTACATATCCCTCTTTAGGGGATGGTGTGTGTATGT |
| | GTGTGTGATGGAGAATCTGGGCATCTGGGTTGGGAATTTTATTTTGTAAGCATTTC |
| | CTACATAATATGAGTTTCTACTTTGATAAAGTCTTGTGTTTTCTGTG (SEQ ID |
| | NO: 43) |
| | >NP_033016.3 nectin-2 isoform 1 precursor [Mus musculus] |
| | MARAAVLPPSRLSPTLPLLPLLLLLLQETGAQDVRVRVLPEVRGRLGGTVELPCHL |
| | LPPTTERVSQVTWQRLDGTVVAAFHPSFGVDFPNSQFSKDRLSFVRARPETNADLR |
| | DATLAFRGLRVEDEGNYTCEFATFPNGTRRGVTWLRVIAQPENHAEAQEVTTGPQS |
| | VAVARCVSIGGRPPARITWISSLGGEAKDTQEPGIQAGIVTIISRYSLVPVGRADG |
| | VKVTCRVEHESFEEPILLPVTLSVRYPPEVSISGYDDNWYLGRSEAILTCDVRSNP |
| | EPTDYDWSTTSGVFPASAVAQGSQLLVHSVDRMVNTTFICTATNAVGTGRAEQVIL |
| | VRESPSTAGAGATGGIIGGIIAAIIATAVAGTGILICRQQRKEQRLQAADEEEELE |
| | GPPSYKPPTPKAKLEEPEMPSQLFTLGASEHSPVKTPYFDAGVSCADQEMPRYHEL |
| | PTLEERSGPLLLGATGLGPSLLVPPGPNVVEGVSLSLEDEEEDDEEEDFLDKINPI |
| | YDALSYPSPSDSYQSKDFFVSRAMYV (SEQ ID NO: 44) |
| Human IL-10 | >NM_000572.3 Homo sapiens interleukin 10 (IL10), |
| | transcript variant 1, mRNA |
| | ACACATCAGGGGCTTGCTCTTGCAAAACCAAACCACAAGACAGACTTGCAAAAGAA |
| | GGCATGCACAGCTCAGCACTGCTCTGTTGCCTGGTCCTCCTGACTGGGGTGAGGGC |
| | CAGCCCAGGCCAGGGCACCCAGTCTGAGAACAGCTGCACCCACTTCCCAGGCAACC |
| | TGCCTAACATGCTTCGAGATCTCCGAGATGCCTTCAGCAGAGTGAAGACTTTCTTT |
| | CAAATGAAGGATCAGCTGGACAACTTGTTGTTAAAGGAGTCCTTGCTGGAGGACTT |
| | TAAGGGTTACCTGGGTTGCCAAGCCTTGTCTGAGATGATCCAGTTTTACCTGGAGG |
| | AGGTGATGCCCCAAGCTGAGAACCAAGACCCAGACATCAAGGCGCATGTGAACTCC |
| | CTGGGGGAGAACCTGAAGACCCTCAGGCTGAGGCTACGGCGCTGTCATCGATTTCT |
| | TCCCTGTGAAAACAAGAGCAAGGCCGTGGAGCAGGTGAAGAATGCCTTTAATAAGC |
| | TCCAAGAGAAAGGCATCTACAAAGCCATGAGTGAGTTTGACATCTTCATCAACTAC |
| | ATAGAAGCCTACATGACAATGAAGATACGAAACTGAGACATCAGGGTGGCGACTCT |
| | ATAGACTCTAGGACATAAATTAGAGGTCTCCAAAATCGGATCTGGGGCTCTGGGAT |
| | AGCTGACCCAGCCCCTTGAGAAACCTTATTGTACCTCTCTTATAGAATATTTATTA |
| | CCTCTGATACCTCAACCCCCATTTCTATTTATTTACTGAGCTTCTCTGTGAACGAT |
| | TTAGAAAGAAGCCCAATATTATAATTTTTTTCAATATTTATTATTTTCACCTGTTT |
| | TTAAGCTGTTTCCATAGGGTGACACACTATGGTATTTGAGTGTTTTAAGATAAATT |
| | ATAAGTTACATAAGGGAGGAAAAAAAATGTTCTTTGGGGAGCCAACAGAAGCTTCC |
| | ATTCCAAGCCTGACCACGCTTTCTAGCTGTTGAGCTGTTTTCCCTGACCTCCCTCT |
| | AATTTATCTTGTCTCTGGGCTTGGGGCTTCCTAACTGCTACAAATACTCTTAGGAA |
| | GAGAAACCAGGGAGCCCCTTTGATGATTAATTCACCTTCCAGTGTCTCGGAGGGAT |
| | TCCCCTAACCTCATTCCCCAACCACTTCATTCTTGAAAGCTGTGGCCAGCTTGTTA |
| | TTTATAACAACCTAAATTTGGTTCTAGGCCGGGCGCGGTGGCTCACGCCTGTAATC |
| | CCAGCACTTTGGGAGGCTGAGGCGGGTGGATCACTTGAGGTCAGGAGTTCCTAACC |
| | AGCCTGGTCAACATGGTGAAACCCCGTCTCTACTAAAAATACAAAAATTAGCCGGG |
| | CATGGTGGCGCGCACCTGTAATCCCAGCTACTTGGGAGGCTGAGGCAAGAGAATTG |
| | CTTGAACCCAGGAGATGGAAGTTGCAGTGAGCTGATATCATGCCCCTGTACTCCAG |
| | CCTGGGTGACAGAGCAAGACTCTGTCTCAAAAAATAAAAATAAAAATAAATTTGGT |
| | TCTAATAGAACTCAGTTTTAACTAGAATTTATTCAATTCCTCTGGGAATGTTACAT |
| | TGTTTGTCTGTCTTCATAGCAGATTTTAATTTTGAATAAATAAATGTATCTTATTC |
| | ACATCA (SEQ ID NO: 45) |
| | >NP_000563.1 interleukin-10 isoform 1 precursor [Homo |
| | sapiens] |
| | MHSSALLCCLVLLTGVRASPGQGTQSENSCTHFPGNLPNMLRDLRDAFSRVKTFFQ |
| | MKDQLDNLLLKESLLEDFKGYLGCQALSEMIQFYLEEVMPQAENQDPDIKAHVNSL |
| | GENLKTLRLRLRRCHRFLPCENKSKAVEQVKNAFNKLQEKGIYKAMSEFDIFINYI |
| | EAYMTMKIRN (SEQ ID NO: 46) |
| Mouse IL-10 | >NM_010548.2 Mus musculus interleukin 10 (Il10), mRNA |
| | ACATTTAGAGACTTGCTCTTGCACTACCAAAGCCACAAGGCAGCCTTGCAGAAAAG |
| | AGAGCTCCATCATGCCTGGCTCAGCACTGCTATGCTGCCTGCTCTTACTGACTGGC |
| | ATGAGGATCAGCAGGGGCCAGTACAGCCGGGAAGACAATAACTGCACCCACTTCCC |
| | AGTCGGCCAGAGCCACATGCTCCTAGAGCTGCGGACTGCCTTCAGCCAGGTGAAGA |
| | CTTTCTTTCAAACAAAGGACCAGCTGGACAACATACTGCTAACCGACTCCTTAATG |
| | CAGGACTTTAAGGGTTACTTGGGTTGCCAAGCCTTATCGGAAATGATCCAGTTTTA |
| | CCTGGTAGAAGTGATGCCCCAGGCAGAGAAGCATGGCCCAGAAATCAAGGAGCATT |
| | TGAATTCCCTGGGTGAGAAGCTGAAGACCCTCAGGATGCGGCTGAGGCGCTGTCAT |
| | CGATTTCTCCCCTGTGAAAATAAGAGCAAGGCAGTGGAGCAGGTGAAGAGTGATTT |
| | TAATAAGCTCCAAGACCAAGGTGTCTACAAGGCCATGAATGAATTTGACATCTTCA |
| | TCAACTGCATAGAAGCATACATGATGATCAAAATGAAAAGCTAAAACACCTGCAGT |
| | GTGTATTGAGTCTGCTGGACTCCAGGACCTAGACAGAGCTCTCTAAATCTGATCCA |
| | GGGATCTTAGCTAACGGAAACAACTCCTTGGAAAACCTCGTTTGTACCTCTCTCCG |
| | AAATATTTATTACCTCTGATACCTCAGTTCCCATTCTATTTATTCACTGAGCTTCT |
| | CTGTGAACTATTTAGAAAGAAGCCCAATATTATAATTTTACAGTATTTATTATTTT |
| | TAACCTGTGTTTAAGCTGTTTCCATTGGGGACACTTTATAGTATTTAAAGGGAGAT |
| | TATATTATATGATGGGAGGGGTTCTTCCTTGGGAAGCAATTGAAGCTTCTATTCTA |
| | AGGCTGGCCACACTTGAGAGCTGCAGGGCCCTTTGCTATGGTGTCCTTTCAATTGC |
| | TCTCATCCCTGAGTTCAGAGCTCCTAAGAGAGTTGTGAAGAAACTCATGGGTCTTG |
| | GGAAGAGAAACCAGGGAGATCCTTTGATGATCATTCCTGCAGCAGCTCAGAGGGTT |
| | CCCCTACTGTCATCCCCCAGCCGCTTCATCCCTGAAAACTGTGGCCAGTTTGTTAT |
| | TTATAACCACCTAAAATTAGTTCTAATAGAACTCATTTTTAACTAGAAGTAATGCA |
| | ATTCCTCTGGGAATGGTGTATTGTTTGTCTGCCTTTGTAGCAGACTCTAATTTTGA |
| | ATAAATGGATCTTATTCG (SEQ ID NO: 47) |
| | >NP_034678.1 interleukin-10 precursor [Mus musculus] |
| | MPGSALLCCLLLLTGMRISRGQYSREDNNCTHFPVGQSHMLLELRTAFSQVKTFFQ |
| | TKDQLDNILLTDSLMQDFKGYLGCQALSEMIQFYLVEVMPQAEKHGPEIKEHLNSL |
| | GEKLKTLRMRLRRCHRFLPCENKSKAVEQVKSDENKLQDQGVYKAMNEFDIFINCI |
| | EAYMMIKMKS (SEQ ID NO: 48) |
| Human TSG-6 | >NM_007115.3 Homo sapiens TNF alpha induced protein 6 |
| | (TNFAIP6), mRNA |
| | AGTCACATTTCAGCCACTGCTCTGAGAATTTGTGAGCAGCCCCTAACAGGCTGTTA |
| | CTTCACTACAACTGACGATATGATCATCTTAATTTACTTATTTCTCTTGCTATGGG |
| | AAGACACTCAAGGATGGGGATTCAAGGATGGAATTTTTCATAACTCCATATGGCTT |
| | GAACGAGCAGCCGGTGTGTACCACAGAGAAGCACGGTCTGGCAAATACAAGCTCAC |
| | CTACGCAGAAGCTAAGGCGGTGTGTGAATTTGAAGGCGGCCATCTCGCAACTTACA |
| | AGCAGCTAGAGGCAGCCAGAAAAATTGGATTTCATGTCTGTGCTGCTGGATGGATG |
| | GCTAAGGGCAGAGTTGGATACCCCATTGTGAAGCCAGGGCCCAACTGTGGATTTGG |
| | AAAAACTGGCATTATTGATTATGGAATCCGTCTCAATAGGAGTGAAAGATGGGATG |
| | CCTATTGCTACAACCCACACGCAAAGGAGTGTGGTGGCGTCTTTACAGATCCAAAG |
| | CAAATTTTTAAATCTCCAGGCTTCCCAAATGAGTACGAAGATAACCAAATCTGCTA |
| | CTGGCACATTAGACTCAAGTATGGTCAGCGTATTCACCTGAGTTTTTTAGATTTTG |
| | ACCTTGAAGATGACCCAGGTTGCTTGGCTGATTATGTTGAAATATATGACAGTTAC |
| | GATGATGTCCATGGCTTTGTGGGAAGATACTGTGGAGATGAGCTTCCAGATGACAT |
| | CATCAGTACAGGAAATGTCATGACCTTGAAGTTTCTAAGTGATGCTTCAGTGACAG |
| | CTGGAGGTTTCCAAATCAAATATGTTGCAATGGATCCTGTATCCAAATCCAGTCAA |
| | GGAAAAAATACAAGTACTACTTCTACTGGAAATAAAAACTTTTTAGCTGGAAGATT |
| | TAGCCACTTATAAAAAAAAAAAAAAGGATGATCAAAACACACAGTGTTTATGTTGG |
| | AATCTTTTGGAACTCCTTTGATCTCACTGTTATTATTAACATTTATTTATTATTTT |
| | TCTAAATGTGAAAGCAATACATAATTTAGGGAAAATTGGAAAATATAGGAAACTTT |
| | AAACGAGAAAATGAAACCTCTCATAATCCCACTGCATAGAAATAACAAGCGTTAAC |
| | ATTTTCATATTTTTTTCTTTCAGTCATTTTTCTATTTGTGGTATATGTATATATGT |
| | ACCTATATGTATTTGCATTTGAAATTTTGGAATCCTGCTCTATGTACAGTTTTGTA |
| | TTATACTTTTTAAATCTTGAACTTTATAAACATTTTCTGAAATCATTGATTATTCT |
| | ACAAAAACATGATTTTAAACAGCTGTAAAATATTCTATGATATGAATGTTTTATGC |
| | ATTATTTAAGCCTGTCTCTATTGTTGGAATTTCAGGTCATTTTCATAAATATTGTT |
| | GCAATAAATATCCTTGAACACACAAAAAAAAAAAAAAAA (SEQ ID NO: 49) |
| | >NP_009046.2 tumor necrosis factor-inducible gene 6 |
| | protein precursor [Homo sapiens] |
| | MIILIYLFLLLWEDTQGWGFKDGIFHNSIWLERAAGVYHREARSGKYKLTYAEAKA |
| | VCEFEGGHLATYKQLEAARKIGFHVCAAGWMAKGRVGYPIVKPGPNCGFGKTGIID |
| | YGIRLNRSERWDAYCYNPHAKECGGVFTDPKQIFKSPGFPNEYEDNQICYWHIRLK |
| | YGQRIHLSFLDFDLEDDPGCLADYVEIYDSYDDVHGFVGRYCGDELPDDIISTGNV |
| | [sequence omitted] |
| | (SEQ ID NO: 50) |
| Mouse TSG-6 | >NM_009398.2 Mus musculus tumor necrosis factor alpha |
| | induced protein 6 (Infaip6), mRNA |
| | CCGCTGCTCTGAGAATTTCGTGTGGGCAGCCCCGACATTGTAACCGGCTCTGCAAC |
| | CGAAGAGATGGTCGTCCTCCTTTGCTTATGCGTCTTGCTGTGGGAAGAGGCTCACG |
| | GATGGGGATTCAAGAACGGGATCTTTCATAACTCCATATGGCTTGAACAAGCAGCG |
| | GGCGTATACCACAGAGAAGCTCGGGCTGGCAGATACAAGCTCACCTACGCCGAAGC |
| | CAAGGCCGTATGTGAATTTGAAGGTGGTCGTCTCGCAACCTACAAGCAGCTAGAGG |
| | CAGCCAGAAAAATTGGATTCCATGTCTGTGCTGCTGGATGGATGGCCAAGGGTAGA |
| | GTCGGATACCCCATTGTGAAACCTGGGCCCAACTGTGGATTTGGGAAAACGGGTAT |
| | CATCGATTATGGAATCCGGCTCAACAGGAGTGAGCGATGGGATGCCTATTGCTACA |
| | ACCCACATGCAAAGGAGTGTGGTGGTGTCTTCACAGATCCGAAGCGAATTTTTAAA |
| | TCCCCGGGCTTCCCAAATGAGTACGATGACAACCAGGTCTGCTACTGGCACATTCG |
| | GCTCAAGTACGGTCAGCGAATTCACCTGAGCTTTTTGGACTTTGACCTTGAACATG |
| | ATCCAGGCTGCTTGGCTGACTATGTAGAAATCTATGACAGTTATGATGACGTCCAC |
| | GGCTTTGTAGGAAGATACTGTGGTGATGAACTTCCAGAAGACATCATTAGCACAGG |
| | AAATGTCATGACCTTGAAGTTTCTGAGTGATGCATCCGTCACGGCTGGAGGCTTCC |
| | AGATTAAATACGTCACAGTGGATCCTGCATCTAAATCCAGTCAAGCCAAAAATACA |
| | AGTACTACTGGAAATAAGAAGTTCTTACCTGGAAGGTTTAGCCATCTATAAAAAAT |
| | TTTTTTTAAAAATGTTCAAAACATCCAGTACAATATTTATATTTGTTTTTGTTGTT |
| | GTTGTTGGTTTTTTTTTTTTTATTTTGTTTTGTTTTGTTTTTTTGAGACGGGGTTT |
| | CTCTGTATAGCCTTGGCTGTCCTGGAACTCACTTTGAAGACCAGGCTGGCCTCGAA |
| | CTCAGAAATCCACCTGCCTCCGCCTACCAAGTGCTGGGATTAAAGGCGTCCACCAC |
| | CACCGCCCGGCTTCAATATTTATATTTGTAGCTCTTGGACCTCGTTTGTTCTCTTT |
| | TGTATTTTTATTATTAACATGTATTTATTATTTTTCCAAATGTGAAAGCCATATGT |
| | AATTATGTGGAAAATTGACAAATAAATACAGAGAACTTCAAATGAGTTTTTTTTTT |
| | AAATCTCATAATTGTACTACACAGAAATAACTAATGTTAAAGTTTTTAAATGTTTG |
| | TCTTTCATTCATTTTTCTACTTGTAGTATATGTACATATGTAACTCTATGATTTGC |
| | GTTTGAATTTTGGCATTCTGCCTTTTGTAACCTGATATTTTTAACCTTGACATTGT |
| | ATAGCTCAAGCACTTCCCAAGATCTCTGAGTTTTCTACAAAATGGGACTTTGTAAA |
| | TATGATTGTTCCCTGCTTTATTTAAGCTGAATTTATATTAGGATTTAAGGTTGTTT |
| | TCATAAATATTGCTGTAATAAATACTTTTGGAT (SEQ ID NO: 51) |
| | >NP_033424.1 tumor necrosis factor-inducible gene 6 |
| | protein precursor [Mus musculus] |
| | MVVLLCLCVLLWEEAHGWGFKNGIFHNSIWLEQAAGVYHREARAGRYKLTYAEAKA |
| | VCEFEGGRLATYKQLEAARKIGFHVCAAGWMAKGRVGYPIVKPGPNCGFGKTGIID |
| | YGIRLNRSERWDAYCYNPHAKECGGVFTDPKRIFKSPGFPNEYDDNQVCYWHIRLK |
| | YGQRIHLSFLDFDLEHDPGCLADYVEIYDSYDDVHGFVGRYCGDELPEDIISTGNV |
| | MTLKFLSDASVTAGGFQIKYVTVDPASKSSQAKNTSTTGNKKFLPGRFSHL (SEQ |
| | ID NO: 52) |
| Human B7-H3 | >NM_001024736.2 Homo sapiens CD276 molecule (CD276), |
| (CD276) | transcript variant 1, mRNA |
| | ATTCGGGCCGGGCCTCGCTGCGGCGGCGACTGAGCCAGGCTGGGCCGCGTCCCTGA |
| | GTCCCAGAGTCGGCGCGGCGCGGCAGGGGCAGCCTTCCACCACGGGGAGCCCAGCT |
| | GTCAGCCGCCTCACAGGAAGATGCTGCGTCGGCGGGGCAGCCCTGGCATGGGTGTG |
| | CATGTGGGTGCAGCCCTGGGAGCACTGTGGTTCTGCCTCACAGGAGCCCTGGAGGT |
| | CCAGGTCCCTGAAGACCCAGTGGTGGCACTGGTGGGCACCGATGCCACCCTGTGCT |
| | GCTCCTTCTCCCCTGAGCCTGGCTTCAGCCTGGCACAGCTCAACCTCATCTGGCAG |
| | CTGACAGATACCAAACAGCTGGTGCACAGCTTTGCTGAGGGCCAGGACCAGGGCAG |
| | CGCCTATGCCAACCGCACGGCCCTCTTCCCGGACCTGCTGGCACAGGGCAACGCAT |
| | CCCTGAGGCTGCAGCGCGTGCGTGTGGCGGACGAGGGCAGCTTCACCTGCTTCGTG |
| | AGCATCCGGGATTTCGGCAGCGCTGCCGTCAGCCTGCAGGTGGCCGCTCCCTACTC |
| | GAAGCCCAGCATGACCCTGGAGCCCAACAAGGACCTGCGGCCAGGGGACACGGTGA |
| | CCATCACGTGCTCCAGCTACCAGGGCTACCCTGAGGCTGAGGTGTTCTGGCAGGAT |
| | GGGCAGGGTGTGCCCCTGACTGGCAACGTGACCACGTCGCAGATGGCCAACGAGCA |
| | GGGCTTGTTTGATGTGCACAGCATCCTGCGGGTGGTGCTGGGTGCAAATGGCACCT |
| | ACAGCTGCCTGGTGCGCAACCCCGTGCTGCAGCAGGATGCGCACAGCTCTGTCACC |
| | ATCACACCCCAGAGAAGCCCCACAGGAGCCGTGGAGGTCCAGGTCCCTGAGGACCC |
| | GGTGGTGGCCCTAGTGGGCACCGATGCCACCCTGCGCTGCTCCTTCTCCCCCGAGC |
| | CTGGCTTCAGCCTGGCACAGCTCAACCTCATCTGGCAGCTGACAGACACCAAACAG |
| | CTGGTGCACAGTTTCACCGAAGGCCGGGACCAGGGCAGCGCCTATGCCAACCGCAC |
| | GGCCCTCTTCCCGGACCTGCTGGCACAAGGCAATGCATCCCTGAGGCTGCAGCGCG |
| | TGCGTGTGGCGGACGAGGGCAGCTTCACCTGCTTCGTGAGCATCCGGGATTTCGGC |
| | AGCGCTGCCGTCAGCCTGCAGGTGGCCGCTCCCTACTCGAAGCCCAGCATGACCCT |
| | GGAGCCCAACAAGGACCTGCGGCCAGGGGACACGGTGACCATCACGTGCTCCAGCT |
| | ACCGGGGCTACCCTGAGGCTGAGGTGTTCTGGCAGGATGGGCAGGGTGTGCCCCTG |
| | ACTGGCAACGTGACCACGTCGCAGATGGCCAACGAGCAGGGCTTGTTTGATGTGCA |
| | CAGCGTCCTGCGGGTGGTGCTGGGTGCGAATGGCACCTACAGCTGCCTGGTGCGCA |
| | ACCCCGTGCTGCAGCAGGATGCGCACGGCTCTGTCACCATCACAGGGCAGCCTATG |
| | ACATTCCCCCCAGAGGCCCTGTGGGTGACCGTGGGGCTGTCTGTCTGTCTCATTGC |
| | ACTGCTGGTGGCCCTGGCTTTCGTGTGCTGGAGAAAGATCAAACAGAGCTGTGAGG |
| | AGGAGAATGCAGGAGCTGAGGACCAGGATGGGGAGGGAGAAGGCTCCAAGACAGCC |
| | CTGCAGCCTCTGAAACACTCTGACAGCAAAGAAGATGATGGACAAGAAATAGCCTG |
| | ACCATGAGGACCAGGGAGCTGCTACCCCTCCCTACAGCTCCTACCCTCTGGCTGCA |
| | ATGGGGCTGCACTGTGAGCCCTGCCCCCAACAGATGCATCCTGCTCTGACAGGTGG |
| | GCTCCTTCTCCAAAGGATGCGATACACAGACCACTGTGCAGCCTTATTTCTCCAAT |
| | GGACATGATTCCCAAGTCATCCTGCTGCCTTTTTTCTTATAGACACAATGAACAGA |
| | CCACCCACAACCTTAGTTCTCTAAGTCATCCTGCCTGCTGCCTTATTTCACAGTAC |
| | ATACATTTCTTAGGGACACAGTACACTGACCACATCACCACCCTCTTCTTCCAGTG |
| | CTGCGTGGACCATCTGGCTGCCTTTTTTCTCCAAAAGATGCAATATTCAGACTGAC |
| | TGACCCCCTGCCTTATTTCACCAAAGACACGATGCATAGTCACCCCGGCCTTGTTT |
| | CTCCAATGGCCGTGATACACTAGTGATCATGTTCAGCCCTGCTTCCACCTGCATAG |
| | AATCTTTTCTTCTCAGACAGGGACAGTGCGGCCTCAACATCTCCTGGAGTCTAGAA |
| | GCTGTTTCCTTTCCCCTCCTTCCTCCTCTTGCTCTAGCCTTAATACTGGCCTTTTC |
| | CCTCCCTGCCCCAAGTGAAGACAGGGCACTCTGCGCCCACCACATGCACAGCTGTG |
| | CATGGAGACCTGCAGGTGCACGTGCTGGAACACGTGTGGTTCCCCCCTGGCCCAGC |
| | CTCCTCTGCAGTGCCCCTCTCCCCTGCCCATCCTCCCCACGGAAGCATGTGCTGGT |
| | CACACTGGTTCTCCAGGGGTCTGTGATGGGGCCCCTGGGGGTCAGCTTCTGTCCCT |
| | CTGCCTTCTCACCTCTTTGTTCCTTTCTTTTCATGTATCCATTCAGTTGATGTTTA |
| | TTGAGCAACTACAGATGTCAGCACTGTGTTAGGTGCTGGGGGCCCTGCGTGGGAAG |
| | ATAAAGTTCCTCCCTCAAGGACTCCCCATCCAGCTGGGAGACAGACAACTAACTAC |
| | ACTGCACCCTGCGGTTTGCAGGGGGCTCCTGCCTGGCTCCCTGCTCCACACCTCCT |
| | CTGTGGCTCAAGGCTTCCTGGATACCTCACCCCCATCCCACCCATAATTCTTACCC |
| | AGAGCATGGGGTTGGGGCGGAAACCTGGAGAGAGGGACATAGCCCCTCGCCACGGC |
| | TAGAGAATCTGGTGGTGTCCAAAATGTCTGTCCAGGTGTGGGCAGGTGGGCAGGCA |
| | CCAAGGCCCTCTGGACCTTTCATAGCAGCAGAAAAGGCAGAGCCTGGGGCAGGGCA |
| | GGGCCAGGAATGCTTTGGGGACACCGAGGGGACTGCCCCCCACCCCCACCATGGTG |
| | CTATTCTGGGGCTGGGGCAGTCTTTTCCTGGCTTGCCTCTGGCCAGCTCCTGGCCT |
| | CTGGTAGAGTGAGACTTCAGACGTTCTGATGCCTTCCGGATGTCATCTCTCCCTGC |
| | CCCAGGAATGGAAGATGTGAGGACTTCTAATTTAAATGTGGGACTCGGAGGGATTT |
| | TGTAAACTGGGGGTATATTTTGGGGAAAATAAATGTCTTTGTAAAAA (SEQ ID |
| | NO: 53) |
| | >NP_001019907.1 CD276 antigen isoform a precursor [Homo |
| | sapiens] |
| | MLRRRGSPGMGVHVGAALGALWFCLTGALEVQVPEDPVVALVGTDATLCCSFSPEP |
| | GFSLAQLNLIWQLTDTKQLVHSFAEGQDQGSAYANRTALFPDLLAQGNASLRLQRV |
| | RVADEGSFTCFVSIRDFGSAAVSLQVAAPYSKPSMTLEPNKDLRPGDTVTITCSSY |
| | QGYPEAEVFWQDGQGVPLTGNVTTSQMANEQGLFDVHSILRVVLGANGTYSCLVRN |
| | PVLQQDAHSSVTITPQRSPTGAVEVQVPEDPVVALVGTDATLRCSFSPEPGFSLAQ |
| | LNLIWQLTDTKQLVHSFTEGRDQGSAYANRTALFPDLLAQGNASLRLQRVRVADEG |
| | SFTCFVSIRDFGSAAVSLQVAAPYSKPSMTLEPNKDLRPGDTVTITCSSYRGYPEA |
| | EVFWQDGQGVPLTGNVTTSQMANEQGLFDVHSVLRVVLGANGTYSCLVRNPVLQQD |
| | AHGSVTITGQPMTFPPEALWVTVGLSVCLIALLVALAFVCWRKIKQSCEEENAGAE |
| | DQDGEGEGSKTALQPLKHSDSKEDDGQEIA (SEQ ID NO: 54) |
| Mouse BH-H3 | >NM_133983.4 Mus musculus CD276 antigen (Cd276), mRNA |
| (CD276) | CGGCGCGGCGCGCCAAAGTGACCTGGTACAGCCTGGACCCCAAGCTCATCGGCTTT |
| | GTCTGGCTGGCCGCCTGGCCTCTTCCCACTTGGATTTGGATGATCCTGAGGCCTTT |
| | GGAGGAACTTCGAGACAAAGGCCCCTCTTCCTCTTCCACGGGCAGGAGCAGCCATT |
| | CGCCACGGAGAGCCCAGCTGTCAGCTGTCTCACAGGAAGATGCTTCGAGGATGGGG |
| | TGGCCCCAGTGTGGGTGTGTGTGTGCGCACAGCACTGGGGGTGCTGTGCCTCTGCC |
| | TCACAGGAGCTGTGGAAGTCCAGGTCTCTGAAGACCCCGTGGTGGCCCTGGTGGAC |
| | ACGGATGCCACCCTACGCTGCTCCTTTTCCCCAGAGCCTGGCTTCAGTCTGGCACA |
| | GCTCAACCTCATCTGGCAGCTGACAGACACCAAACAGCTGGTGCACAGCTTCACGG |
| | AGGGCCGGGACCAAGGCAGTGCCTACTCCAACCGCACAGCGCTCTTCCCTGACCTG |
| | TTGGTGCAAGGCAATGCGTCCTTGAGGCTGCAGCGCGTCCGAGTAACCGACGAGGG |
| | CAGCTACACCTGCTTTGTGAGCATCCAGGACTTTGACAGCGCTGCTGTTAGCCTGC |
| | AGGTGGCCGCCCCCTACTCGAAGCCCAGCATGACCCTGGAGCCCAACAAGGACCTA |
| | CGTCCAGGGAACATGGTGACCATCACGTGCTCTAGCTACCAGGGCTATCCGGAGGC |
| | CGAGGTGTTCTGGAAGGATGGACAGGGAGTGCCCTTGACTGGCAATGTGACCACAT |
| | CCCAGATGGCCAACGAGCGGGGCTTGTTCGATGTTCACAGCGTGCTGAGGGTGGTG |
| | CTGGGTGCTAACGGCACCTACAGCTGCCTGGTACGCAACCCGGTGTTGCAGCAAGA |
| | TGCTCACGGCTCAGTCACCATCACAGGGCAGCCCCTGACATTCCCCCCTGAGGCTC |
| | TGTGGGTAACCGTGGGGCTCTCTGTCTGTCTTGTGGTACTACTGGTGGCCCTGGCT |
| | TTCGTGTGCTGGAGAAAGATCAAGCAGAGCTGCGAGGAGGAGAATGCAGGTGCCGA |
| | GGACCAGGATGGAGATGGAGAAGGATCCAAGACAGCTCTACGGCCTCTGAAACCCT |
| | CTGAAAACAAAGAAGATGACGGACAAGAAATTGCTTGATTGGGAGCTGCTGCCCTT |
| | CCCAGGTGGGGGGCCCACCCTCTGGCAGTGTTGAGCTTCAATGCGAGCCCTTCCCC |
| | CAACGAATGGGTTTGTCCCACAGATCTACCCGTTCGTCAAAGGACGTGGTCCATAG |
| | ACCACCCACAGCCTTACTTTTCCAATGGACTTAATTCCCATCATCCTGCAGCCTCA |
| | TTTCTCCAGTGACACGATACACGAACCATCCTGCGGCCTTATTTCCCACGGACACG |
| | ACACAAAGATGTCCCTCCTCGGTGTTCCTCCAGAGTCGTCTGGTGGCCTTGTGATA |
| | CGGCGTGAACCTTCTTCCTTCTGCCTTACGTCTAATGGACACACACGCACCACCCC |
| | CACACCCTTGCTCCTCCAAAGCCATGCAGACTGTGTAACTGCTATTATTCTCCAAG |
| | GGGCATCCTGTGCAGATGAAACCCTGCTTTATTTCCCTGAAGACAGCTGCACAGTG |
| | ACCTCTTAGTTCTTGCTCCCATGGCCCTGATGTATCCTAGTTACCAGCCCTCAACC |
| | TCAGTTCTGAGGGTGGGATCCCATCGCTCAGCAAGGCTTCATCCTGACCTCCCTGC |
| | CCTGATCTGATCTGGCCCTGGCTTTTGTTGTCTCGCTCCCTGACTAAGTGAGATGG |
| | GGCACTCTCCCGCCCCCGCCCCCCCCAGGTCACAGATACCTACCTGCAGCTGTGCG |
| | TGCTGGATCACGCACATACTTGCCTTGCATGGTCTCCTGGCTGCCCTGGGCTGTGC |
| | CTGTTCTTCCATAGGAAGCAAGTTCTTGTCTCCCTGGTTCTCAGGGCCCCTCAGGG |
| | GCTCAGCCTTCAGCCCTGTGCTTCCCCATGTTGGGAATCTTTGTTACCTTTTTCTT |
| | CTTTGTAAATTAACATCTGATAACAACCACAGGGTCCAATGGGACTTTCACAGACC |
| | TGCCAGCTAGATAAATAATGACAACAGAAGTTTATTAATATTTTAAGACTTAGGCC |
| | TTTTGCTGGGCAGCCTCCCAACTATTCTATCCTGACTAATCCTGGCACTATGTCCC |
| | ACCACATGGCCAGGTCTACCTCTCTGCTCCACTCTCCATCCACCTCCATGTCTGCC |
| | AGCAAATCTCCCGTGATTCAGTTCTTCTCCCAGAGTCCCTATCTCTGCCCAGAAGT |
| | ACCATCTTCGACTTCCTGCCCAACTATTGGCCGTCAGCTCTTCATTAAAGCCGATC |
| | AGATGTAATTCTAGATTGCCTTAGGCAGGTGAGGAAGAAACAAGTATTTGTAAAAT |
| | ATGAGACCAGCAATGGGCCATAGAAATAACAGCACCAGATCCTGCCAGCATTTAGC |
| | CCTCTGTTGGTACAAAATTAACAATTGAATATACAGAGACCTACTTCCAGAGTGTA |
| | CCCCAACAACAGGCGTGAGCATGGTGCTGGGTACTAGGGTCCTGCTGGAAAATCAG |
| | AGACCTTACCTACAGCTGGGACATGACCTTGCTTCCGACTTACCCACCACTTCTGG |
| | ATACCTCACCCTCAGCCCACACTATCCCTGGCCTAGGGCCCAGGGTAGAGCCAGAA |
| | ACATGGAGAAAGCATGGCCCCTTGCCGTACCTGGAGAACTGGGTATTTTCCAGAGT |
| | CTTTATAGATGTGGACTGGAAGGCAGGTGGCCACAGCCGTGCAGACCTGGGTCAGG |
| | TCAGAAACCTATGCCATGCTGGGACCTACTCAACAGCAGAAGCATGAAGAGGGCCT |
| | GAGGACAAGAAAGGCCTTCTTACCATGGTGCTATTCTGGAGCTGGGATATATACCT |
| | GGCTTGTCTCTGACTGCCCTGGCTTCTGGCAGAACTTCTGATGTCCTCCTGAAGGC |
| | CTCTCTCCCACCCCAGTACCTGAGAACCTGAGGATAATTTAAACATGGGACTCTGG |
| | CCAGCACCTGGGAGAGACAGGTAGATCTCTGATTTTTGACTCAGCCTGGTCTATCG |
| | AGTGAGTTCCAGGACATCTGGGGCTACACAGAGAAACCATCTTAAAGACTAAAAAT |
| | AATAAACATGAGACTGTAAACTGGGTGTATTTTGGGAGAAATAAATGTCTTTTTCT |
| | TTCAA (SEQ ID NO: 55) |
| | >NP_598744.1 CD276 antigen precursor [Mus musculus] |
| | MLRGWGGPSVGVCVRTALGVLCLCLTGAVEVQVSEDPVVALVDTDATLRCSFSPEP |
| | GFSLAQLNLIWQLTDTKQLVHSFTEGRDQGSAYSNRTALFPDLLVQGNASLRLQRV |
| | RVTDEGSYTCFVSIQDFDSAAVSLQVAAPYSKPSMTLEPNKDLRPGNMVTITCSSY |
| | QGYPEAEVFWKDGQGVPLTGNVTTSQMANERGLFDVHSVLRVVLGANGTYSCLVRN |
| | PVLQQDAHGSVTITGQPLTFPPEALWVTVGLSVCLVVLLVALAFVCWRKIKQSCEE |
| | ENAGAEDQDGDGEGSKTALRPLKPSENKEDDGQEIA (SEQ ID NO: 56) |
| Human B7-H4 | >NM_024626.4 Homo sapiens V-set domain containing T cell |
| (VTCN1) | activation inhibitor 1 (VTCN1), transcript variant 1, mRNA |
| | GTGAGTCACCAAGGAAGGCAGCGGCAGCTCCACTCAGCCAGTACCCAGATACGCTG |
| | GGAACCTTCCCCAGCCATGGCTTCCCTGGGGCAGATCCTCTTCTGGAGCATAATTA |
| | GCATCATCATTATTCTGGCTGGAGCAATTGCACTCATCATTGGCTTTGGTATTTCA |
| | GGGAGACACTCCATCACAGTCACTACTGTCGCCTCAGCTGGGAACATTGGGGAGGA |
| | TGGAATCCTGAGCTGCACTTTTGAACCTGACATCAAACTTTCTGATATCGTGATAC |
| | AATGGCTGAAGGAAGGTGTTTTAGGCTTGGTCCATGAGTTCAAAGAAGGCAAAGAT |
| | GAGCTGTCGGAGCAGGATGAAATGTTCAGAGGCCGGACAGCAGTGTTTGCTGATCA |
| | AGTGATAGTTGGCAATGCCTCTTTGCGGCTGAAAAACGTGCAACTCACAGATGCTG |
| | GCACCTACAAATGTTATATCATCACTTCTAAAGGCAAGGGGAATGCTAACCTTGAG |
| | TATAAAACTGGAGCCTTCAGCATGCCGGAAGTGAATGTGGACTATAATGCCAGCTC |
| | AGAGACCTTGCGGTGTGAGGCTCCCCGATGGTTCCCCCAGCCCACAGTGGTCTGGG |
| | CATCCCAAGTTGACCAGGGAGCCAACTTCTCGGAAGTCTCCAATACCAGCTTTGAG |
| | CTGAACTCTGAGAATGTGACCATGAAGGTTGTGTCTGTGCTCTACAATGTTACGAT |
| | CAACAACACATACTCCTGTATGATTGAAAATGACATTGCCAAAGCAACAGGGGATA |
| | TCAAAGTGACAGAATCGGAGATCAAAAGGCGGAGTCACCTACAGCTGCTAAACTCA |
| | AAGGCTTCTCTGTGTGTCTCTTCTTTCTTTGCCATCAGCTGGGCACTTCTGCCTCT |
| | CAGCCCTTACCTGATGCTAAAATAATGTGCCTCGGCCACAAAAAAGCATGCAAAGT |
| | CATTGTTACAACAGGGATCTACAGAACTATTTCACCACCAGATATGACCTAGTTTT |
| | ATATTTCTGGGAGGAAATGAATTCATATCTAGAAGTCTGGAGTGAGCAAACAAGAG |
| | CAAGAAACAAAAAGAAGCCAAAAGCAGAAGGCTCCAATATGAACAAGATAAATCTA |
| | TCTTCAAAGACATATTAGAAGTTGGGAAAATAATTCATGTGAACTAGACAAGTGTG |
| | TTAAGAGTGATAAGTAAAATGCACGTGGAGACAAGTGCATCCCCAGATCTCAGGGA |
| | CCTCCCCCTGCCTGTCACCTGGGGAGTGAGAGGACAGGATAGTGCATGTTCTTTGT |
| | CTCTGAATTTTTAGTTATATGTGCTGTAATGTTGCTCTGAGGAAGCCCCTGGAAAG |
| | TCTATCCCAACATATCCACATCTTATATTCCACAAATTAAGCTGTAGTATGTACCC |
| | TAAGACGCTGCTAATTGACTGCCACTTCGCAACTCAGGGGCGGCTGCATTTTAGTA |
| | ATGGGTCAAATGATTCACTTTTTATGATGCTTCCAAAGGTGCCTTGGCTTCTCTTC |
| | CCAACTGACAAATGCCAAAGTTGAGAAAAATGATCATAATTTTAGCATAAACAGAG |
| | CAGTCGGCGACACCGATTTTATAAATAAACTGAGCACCTTCTTTTTAAACAAACAA |
| | ATGCGGGTTTATTTCTCAGATGATGTTCATCCGTGAATGGTCCAGGGAAGGACCTT |
| | TCACCTTGTCTATATGGCATTATGTCATCACAAGCTCTGAGGCTTCTCCTTTCCAT |
| | CCTGCGTGGACAGCTAAGACCTCAGTTTTCAATAGCATCTAGAGCAGTGGGACTCA |
| | GCTGGGGTGATTTCGCCCCCCATCTCCGGGGGAATGTCTGAAGACAATTTTGGTTA |
| | CCTCAATGAGGGAGTGGAGGAGGATACAGTGCTACTACCAACTAGTGGATAGAGGC |
| | CAGGGATGCTGCTCAACCTCCTACCATGTACAGGACGTCTCCCCATTACAACTACC |
| | CAATCCGAAGTGTCAACTGTGTCAGGGCTAAGAAACCCTGGTTTTGAGTAGAAAAG |
| | GGCCTGGAAAGAGGGGAGCCAACAAATCTGTCTGCTTCCTCACATTAGTCATTGGC |
| | AAATAAGCATTCTGTCTCTTTGGCTGCTGCCTCAGCACAGAGAGCCAGAACTCTAT |
| | CGGGCACCAGGATAACATCTCTCAGTGAACAGAGTTGACAAGGCCTATGGGAAATG |
| | CCTGATGGGATTATCTTCAGCTTGTTGAGCTTCTAAGTTTCTTTCCCTTCATTCTA |
| | CCCTGCAAGCCAAGTTCTGTAAGAGAAATGCCTGAGTTCTAGCTCAGGTTTTCTTA |
| | CTCTGAATTTAGATCTCCAGACCCTGCCTGGCCACAATTCAAATTAAGGCAACAAA |
| | CATATACCTTCCATGAAGCACACACAGACTTTTGAAAGCAAGGACAATGACTGCTT |
| | GAATTGAGGCCTTGAGGAATGAAGCTTTGAAGGAAAAGAATACTTTGTTTCCAGCC |
| | CCCTTCCCACACTCTTCATGTGTTAACCACTGCCTTCCTGGACCTTGGAGCCACGG |
| | TGACTGTATTACATGTTGTTATAGAAAACTGATTTTAGAGTTCTGATCGTTCAAGA |
| | GAATGATTAAATATACATTTCCTACACCA (SEQ ID NO: 57) |
| | >NP_078902.2 V-set domain-containing T-cell activation |
| | inhibitor 1 isoform 1 precursor [Homo sapiens] |
| | MASLGQILFWSIISIIIILAGAIALIIGFGISGRHSITVTTVASAGNIGEDGILSC |
| | TFEPDIKLSDIVIQWLKEGVLGLVHEFKEGKDELSEQDEMFRGRTAVFADQVIVGN |
| | ASLRLKNVQLTDAGTYKCYIITSKGKGNANLEYKTGAFSMPEVNVDYNASSETLRC |
| | EAPRWFPQPTVVWASQVDQGANFSEVSNTSFELNSENVTMKVVSVLYNVTINNTYS |
| | CMIENDIAKATGDIKVTESEIKRRSHLQLLNSKASLCVSSFFAISWALLPLSPYLM |
| | LK |
| | (SEQ ID NO: 58) |
| Mouse B7-H4 | >NM_178594.3 Mus musculus V-set domain containing T cell |
| (VTCN1) | activation inhibitor 1 (Vton1), mRNA |
| | GTGAGTCACAACACCCAGGAGGGCAGCAGCAGGCAGGCAGCTCCACTCACCAAAAT |
| | CTGGCCCCACACACAGCAGGACTGTGGGAAGGAACTCCCTCTCCATGGCTTCCTTG |
| | GGGCAGATCATCTTTTGGAGTATTATTAACATCATCATCATCCTGGCTGGGGCCAT |
| | CGCACTCATCATTGGCTTTGGCATTTCAGGCAAGCACTTCATCACGGTCACGACCT |
| | TCACCTCAGCTGGAAACATTGGAGAGGACGGGACCCTGAGCTGCACTTTTGAACCT |
| | GACATCAAACTCAACGGCATCGTCATCCAGTGGCTGAAAGAAGGCATCAAAGGTTT |
| | GGTCCACGAGTTCAAAGAAGGCAAAGACGACCTCTCACAGCAGCATGAGATGTTCA |
| | GAGGCCGCACAGCAGTGTTTGCTGATCAGGTGGTAGTTGGCAATGCTTCCCTGAGA |
| | CTGAAAAACGTGCAGCTCACGGATGCTGGCACCTACACATGTTACATCCGCACCTC |
| | AAAAGGCAAAGGGAATGCAAACCTTGAGTATAAGACCGGAGCCTTCAGTATGCCAG |
| | AGATAAATGTGGACTATAATGCCAGTTCAGAGAGTTTACGCTGCGAGGCTCCTCGG |
| | TGGTTCCCCCAGCCCACAGTGGCCTGGGCATCTCAAGTCGACCAAGGAGCCAATTT |
| | CTCAGAAGTCTCCAACACCAGCTTTGAGTTGAACTCTGAGAATGTGACCATGAAGG |
| | TCGTATCTGTGCTCTACAATGTCACAATCAACAACACATACTCCTGTATGATTGAA |
| | AACGACATTGCCAAAGCCACCGGGGACATCAAAGTGACAGATTCAGAGGTCAAAAG |
| | GCGAAGTCAGCTGCAGTTGCTGAACTCTGGGCCTTCCCCGTGTGTTTTTTCTTCTG |
| | CCTTTGTGGCTGGCTGGGCACTCCTATCTCTCTCCTGTTGCCTGATGCTAAGATGA |
| | GGGGCCCTGGCTACACAAAAGCATGCAACGTTGCTGGTCCAACAGAATCCCGGAGA |
| | ACTACAGAAATATTTTCCTCAAGACATGACCTAGTTTTATATTTCTAGAAGAAGAT |
| | GAAATCATGTCTAGAAGTCTGGAGAGAGCAGACAGGAACAAGATGTGGAAGGAAAA |
| | CAAAAGTAACCCACAGACACCCCCGATCGGAACAAGATGGACCTAGAAAATAATTC |
| | AACCAAACTAGAGTATACTAAGTGTGCTGTTACAATGTGTGTAGGGTAGGTGTCCT |
| | CCCACATCTCAGGGGCCTCCCCTGGTCCACCAGCTCCTGAGTTAGGATGGGCTGTT |
| | ATGATGTCACTCTGAAGGTTCCTGGATGGTTCCTACTGCCATATACTCATTTTATA |
| | TTCAGCACATTAAACCATAGTGAATGCTATGAAAAGCTGCTAATCAGCTGCCACTC |
| | CGAGATTCGGAGGTGGCAACGTCTGAGTGACAGGTCCAGTGATTCGCTTCTCCTTA |
| | GGATGCTTTTACAAGCTCTTTGGCGTCTCCTCCCACCTGGCAAATGCCAAATGCAT |
| | AGGGGAGGGTGATCATCATTCTAGGGCAAACAAAATAGTTGAGGGATGCTGATTTC |
| | CCAAATCATCCGAATCACTTCTCCCTTGAGCAAACAAGCGCCCTGTTATTTCTCAA |
| | ATGCTGCTTTGTGAATCAGTCCAGGGCAAGGCGCTCTCCTCATCCCGCTATGTGGC |
| | CTTAAGTCATCGTAAGGTTTGAAGTTTCTACTTTCGATCCTGCATGGAGAGCTATA |
| | ATCTCAGCTCCCCCGCCCCCCCCACACACACCTCTGCACACACACCCCCCCCCAAC |
| | ACTGGGAGTAAACCAGGATGATGTCCGTCTTCTCATTCCCCATGTGACCGTTGGCA |
| | GTGTAGAGAGACTGATTGTCACAGCTAAAGGAAGAGGGACAACAGGGTCACTGGTG |
| | TCTACAGAGATTATATTCTACGTGTCTCACTGAATTTACACAACTCCAAGTGCCAA |
| | CCACATCAAGGTCAGGAAATCCTGAACTGGAATAAGAAAGACCCAGAAGATGAATG |
| | TGAACAGATCCATTTGCTTCCCGACAGTGGGCACAGACTTCAGTCTCTGGCTACTG |
| | TTCCAAGACCCAGGGCTCTGCAATTGTGTGACATCCTTCAGTGAACCCACATGGGA |
| | AATTCTCCATGGAATTATCTTCAGCCCACTGTACTTCTGAATCCCTCTTCCTTCCT |
| | TCTGTGCCACACAGCAAGTCTGGCTTAAATGCTGCCTGATCTCCATTTCAAGTTTT |
| | CTGCCTCTGGATTTTTAGATCTCAAGACCATGGACGAAACATCAGTTACAGCAACA |
| | AAAGTGAATTTTCCGTGCAGAGACTTCTAGGGGTTCTGTTTGTTTTCAGGGTGCTA |
| | GAGATCACACTCAGATGCTCATATATGTTAGGTAAATGTTCTCCCACTGAGTTACA |
| | GCCCAGCTCACACAGAGACTTCTAAAAGAAAATACGGCCATGCTCTTTGAAATGGA |
| | GCATTGAGGGATGAAGTTTGGATGGCGAAGAAAACTTCTCACCAGCTCTCTCCCCA |
| | CATTCGTGCCAAGCACTGCCTCCCTAGACTTCGGGTCACCATATCTGTACTACGTT |
| | TTGATACAGAAGGCTCGAGACCATTCAAGAGAATTATTTAGTACAC (SEQ ID |
| | NO: 59) |
| | >NP_848709.2 V-set domain containing T-cell activation |
| | inhibitor 1 precursor [Mus musculus] |
| | MASLGQIIFWSIINIIIILAGAIALIIGFGISGKHFITVTTFTSAGNIGEDGTLSC |
| | TFEPDIKLNGIVIQWLKEGIKGLVHEFKEGKDDLSQQHEMFRGRTAVFADQVVVGN |
| | ASLRLKNVQLTDAGTYTCYIRTSKGKGNANLEYKTGAFSMPEINVDYNASSESLRC |
| | EAPRWFPQPTVAWASQVDQGANFSEVSNTSFELNSENVTMKVVSVLYNVTINNTYS |
| | CMIENDIAKATGDIKVTDSEVKRRSQLQLLNSGPSPCVFSSAFVAGWALLSLSCCL |
| | MLR (SEQ ID NO: 60) |
| Human B7-H5 | >NM_022153.2 Homo sapiens V-set immunoregulatory receptor |
| (VISTA) | (VSIR) , mRNA |
| | AGTCGCGGGAGGCTTCCCCGCGCCGGCCGCGTCCCGCCCGCTCCCCGGCACCAGAA |
| | GTTCCTCTGCGCGTCCGACGGCGACATGGGCGTCCCCACGGCCCTGGAGGCCGGCA |
| | GCTGGCGCTGGGGATCCCTGCTCTTCGCTCTCTTCCTGGCTGCGTCCCTAGGTCCG |
| | GTGGCAGCCTTCAAGGTCGCCACGCCGTATTCCCTGTATGTCTGTCCCGAGGGGCA |
| | GAACGTCACCCTCACCTGCAGGCTCTTGGGCCCTGTGGACAAAGGGCACGATGTGA |
| | CCTTCTACAAGACGTGGTACCGCAGCTCGAGGGGCGAGGTGCAGACCTGCTCAGAG |
| | CGCCGGCCCATCCGCAACCTCACGTTCCAGGACCTTCACCTGCACCATGGAGGCCA |
| | CCAGGCTGCCAACACCAGCCACGACCTGGCTCAGCGCCACGGGCTGGAGTCGGCCT |
| | CCGACCACCATGGCAACTTCTCCATCACCATGCGCAACCTGACCCTGCTGGATAGC |
| | GGCCTCTACTGCTGCCTGGTGGTGGAGATCAGGCACCACCACTCGGAGCACAGGGT |
| | CCATGGTGCCATGGAGCTGCAGGTGCAGACAGGCAAAGATGCACCATCCAACTGTG |
| | TGGTGTACCCATCCTCCTCCCAGGATAGTGAAAACATCACGGCTGCAGCCCTGGCT |
| | ACGGGTGCCTGCATCGTAGGAATCCTCTGCCTCCCCCTCATCCTGCTCCTGGTCTA |
| | CAAGCAAAGGCAGGCAGCCTCCAACCGCCGTGCCCAGGAGCTGGTGCGGATGGACA |
| | GCAACATTCAAGGGATTGAAAACCCCGGCTTTGAAGCCTCACCACCTGCCCAGGGG |
| | ATACCCGAGGCCAAAGTCAGGCACCCCCTGTCCTATGTGGCCCAGCGGCAGCCTTC |
| | TGAGTCTGGGCGGCATCTGCTTTCGGAGCCCAGCACCCCCCTGTCTCCTCCAGGCC |
| | CCGGAGACGTCTTCTTCCCATCCCTGGACCCTGTCCCTGACTCTCCAAACTTTGAG |
| | GTCATCTAGCCCAGCTGGGGGACAGTGGGCTGTTGTGGCTGGGTCTGGGGCAGGTG |
| | CATTTGAGCCAGGGCTGGCTCTGTGAGTGGCCTCCTTGGCCTCGGCCCTGGTTCCC |
| | TCCCTCCTGCTCTGGGCTCAGATACTGTGACATCCCAGAAGCCCAGCCCCTCAACC |
| | CCTCTGGATGCTACATGGGGATGCTGGACGGCTCAGCCCCTGTTCCAAGGATTTTG |
| | GGGTGCTGAGATTCTCCCCTAGAGACCTGAAATTCACCAGCTACAGATGCCAAATG |
| | ACTTACATCTTAAGAAGTCTCAGAACGTCCAGCCCTTCAGCAGCTCTCGTTCTGAG |
| | ACATGAGCCTTGGGATGTGGCAGCATCAGTGGGACAAGATGGACACTGGGCCACCC |
| | TCCCAGGCACCAGACACAGGGCACGGTGGAGAGACTTCTCCCCCGTGGCCGCCTTG |
| | GCTCCCCCGTTTTGCCCGAGGCTGCTCTTCTGTCAGACTTCCTCTTTGTACCACAG |
| | TGGCTCTGGGGCCAGGCCTGCCTGCCCACTGGCCATCGCCACCTTCCCCAGCTGCC |
| | TCCTACCAGCAGTTTCTCTGAAGATCTGTCAACAGGTTAAGTCAATCTGGGGCTTC |
| | CACTGCCTGCATTCCAGTCCCCAGAGCTTGGTGGTCCCGAAACGGGAAGTACATAT |
| | TGGGGCATGGTGGCCTCCGTGAGCAAATGGTGTCTTGGGCAATCTGAGGCCAGGAC |
| | AGATGTTGCCCCACCCACTGGAGATGGTGCTGAGGGAGGTGGGTGGGGCCTTCTGG |
| | GAAGGTGAGTGGAGAGGGGCACCTGCCCCCCGCCCTCCCCATCCCCTACTCCCACT |
| | GCTCAGCGCGGGCCATTGCAAGGGTGCCACACAATGTCTTGTCCACCCTGGGACAC |
| | TTCTGAGTATGAAGCGGGATGCTATTAAAAACTACATGGGGAAACAGGTGCAAACC |
| | CTGGAGATGGATTGTAAGAGCCAGTTTAAATCTGCACTCTGCTGCTCCTCCCCCAC |
| | CCCCACCTTCCACTCCATACAATCTGGGCCTGGTGGAGTCTTCGCTTCAGAGCCAT |
| | TCGGCCAGGTGCGGGTGATGTTCCCATCTCCTGCTTGTGGGCATGCCCTGGCTTTG |
| | TTTTTATACACATAGGCAAGGTGAGTCCTCTGTGGAATTGTGATTGAAGGATTTTA |
| | AAGCAGGGGAGGAGAGTAGGGGGCATCTCTGTACACTCTGGGGGTAAAACAGGGAA |
| | GGCAGTGCCTGAGCATGGGGACAGGTGAGGTGGGGCTGGGCAGACCCCCTGTAGCG |
| | TTTAGCAGGATGGGGGCCCCAGGTACTGTGGAGAGCATAGTCCAGCCTGGGCATTT |
| | GTCTCCTAGCAGCCTACACTGGCTCTGCTGAGCTGGGCCTGGGTGCTGAAAGCCAG |
| | GATTTGGGGCTAGGCGGGAAGATGTTCGCCCAATTGCTTGGGGGGTTGGGGGGATG |
| | GAAAAGGGGAGCACCTCTAGGCTGCCTGGCAGCAGTGAGCCCTGGGCCTGTGGCTA |
| | CAGCCAGGGAACCCCACCTGGACACATGGCCCTGCTTCTAAGCCCCCCAGTTAGGC |
| | CCAAAGGAATGGTCCACTGAGGGCCTCCTGCTCTGCCTGGGCTGGGCCAGGGGCTT |
| | TGAGGAGAGGGTAAACATAGGCCCGGAGATGGGGCTGACACCTCGAGTGGCCAGAA |
| | TATGCCCAAACCCCGGCTTCTCCCTTGTCCCTAGGCAGAGGGGGGTCCCTTCTTTT |
| | GTTCCCTCTGGTCACCACAATGCTTGATGCCAGCTGCCATAGGAAGAGGGTGCTGG |
| | CTGGCCATGGTGGCACACACCTGTCCTCCCAGCACTTTGCAGGGCTGAGGTGGAAG |
| | GACCGCTTAAGCCCAGGTGTTCAAGGCTGCTGTGAGCTGTGTTCGAGCCACTACAC |
| | TCCAGCCTGGGGACGGAGCAAAACTTTGCCTCAAAACAAATTTTAAAAAGAAAGAA |
| | AGAAGGAAAGAGGGTATGTTTTTCACAATTCATGGGGGCCTGCATGGCAGGAGTGG |
| | GGACAGGACACCTGCTGTTCCTGGAGTCGAAGGACAAGCCCACAGCCCAGATTCCG |
| | GTTCTCCCAACTCAGGAAGAGCATGCCCTGCCCTCTGGGGAGGCTGGCCTGGCCCC |
| | AGCCCTCAGCTGCTGACCTTGAGGCAGAGACAACTTCTAAGAATTTGGCTGCCAGA |
| | CCCCAGGCCTGGCTGCTGCTGTGTGGAGAGGGAGGCGGCCCGCAGCAGAACAGCCA |
| | CCGCACTTCCTCCTCAGCTTCCTCTGGTGCGGCCCTGCCCTCTCTTCTCTGGACCC |
| | TTTTACAACTGAACGCATCTGGGCTTCGTGGTTTCCTGTTTTCAGCGAAATTTACT |
| | CTGAGCTCCCAGTTCCATCTTCATCCATGGCCACAGGCCCTGCCTACAACGCACTA |
| | GGGACGTCCCTCCCTGCTGCTGCTGGGGAGGGGCAGGCTGCTGGAGCCGCCCTCTG |
| | AGTTGCCCGGGATGGTAGTGCCTCTGATGCCAGCCCTGGTGGCTGTGGGCTGGGGT |
| | GCATGGGAGAGCTGGGTGCGAGAACATGGCGCCTCCAGGGGGCGGGAGGAGCACTA |
| | GGGGCTGGGGCAGGAGGCTCCTGGAGCGCTGGATTCGTGGCACAGTCTGAGGCCCT |
| | GAGAGGGAAATCCATGCTTTTAAGAACTAATTCATTGTTAGGAGATCAATCAGGAA |
| | TTAGGGGCCATCTTACCTATCTCCTGACATTCACAGTTTAATAGAGACTTCCTGCC |
| | TTTATTCCCTCCCAGGGAGAGGCTGAAGGAATGGAATTGAAAGCACCATTTGGAGG |
| | GTTTTGCTGACACAGCGGGGACTGCTCAGCACTCCCTAAAAACACACCATGGAGGC |
| | CACTGGTGACTGCTGGTGGGCAGGCTGGCCCTGCCTGGGGGAGTCCGTGGCGATGG |
| | GCGCTGGGGTGGAGGTGCAGGAGCCCCAGGACCTGCTTTTCAAAAGACTTCTGCCT |
| | GACCAGAGCTCCCACTACATGCAGTGGCCCAGGGCAGAGGGGCTGATACATGGCCT |
| | TTTTCAGGGGGTGCTCCTCGCGGGGTGGACTTGGGAGTGTGCAGTGGGACAGGGGG |
| | CTGCAGGGGTCCTGCCACCACCGAGCACCAACTTGGCCCCTGGGGTCCTGCCTCAT |
| | GAATGAGGCCTTCCCCAGGGCTGGCCTGACTGTGCTGGGGGCTGGGTTAACGTTTT |
| | CTCAGGGAACCACAATGCACGAAAGAGGAACTGGGGTTGCTAACCAGGATGCTGGG |
| | AACAAAGGCCTCTTGAAGCCCAGCCACAGCCCAGCTGAGCATGAGGCCCAGCCCAT |
| | AGACGGCACAGGCCACCTGGCCCATTCCCTGGGCATTCCCTGCTTTGCATTGCTGC |
| | TTCTCTTCACCCCATGGAGGCTATGTCACCCTAACTATCCTGGAATGTGTTGAGAG |
| | GGATTCTGAATGATCAATATAGCTTGGTGAGACAGTGCCGAGATAGATAGCCATGT |
| | CTGCCTTGGGCACGGGAGAGGGAAGTGGCAGCATGCATGCTGTTTCTTGGCCTTTT |
| | CTGTTAGAATACTTGGTGCTTTCCAACACACTTTCACATGTGTTGTAACTTGTTTG |
| | ATCCACCCCCTTCCCTGAAAATCCTGGGAGGTTTTATTGCTGCCATTTAACACAGA |
| | GGGCAATAGAGGTTCTGAAAGGTCTGTGTCTTGTCAAAACAAGTAAACGGTGGAAC |
| | TACGACTAAA (SEQ ID NO: 61) |
| | >NP_071436.1 V-type immunoglobulin domain-containing |
| | suppressor of T-cell activation precursor [Homo sapiens] |
| | MGVPTALEAGSWRWGSLLFALFLAASLGPVAAFKVATPYSLYVCPEGQNVTLTCRL |
| | LGPVDKGHDVTFYKTWYRSSRGEVQTCSERRPIRNLTFQDLHLHHGGHQAANTSHD |
| | LAQRHGLESASDHHGNFSITMRNLTLLDSGLYCCLVVEIRHHHSEHRVHGAMELQV |
| | QTGKDAPSNCVVYPSSSQDSENITAAALATGACIVGILCLPLILLLVYKQRQAASN |
| | RRAQELVRMDSNIQGIENPGFEASPPAQGIPEAKVRHPLSYVAQRQPSESGRHLLS |
| | EPSTPLSPPGPGDVFFPSLDPVPDSPNFEVI (SEQ ID NO: 62) |
| Mouse B7-H5 | >NM_028732.4 Mus musculus V-set immunoregulatory receptor |
| (VISTA) | (Vsir), transcript variant 1, mRNA |
| | GGGGGCGCTGCTGGGCGGGGAGCTTGCTCGGCCGCCTGCCTCGCCTTGGGCTCAGC |
| | ATTCACTCTAGCGAGCGAGCGGCGTGTACAGCCGGCTCCCTGGGCTCCTGGAGTCC |
| | CGCTTGCTCCAAGCGCACTCCAGCAGTCTCTTTCTGCTCTTGCCCGGCTCGACGGC |
| | GACATGGGTGTCCCCGCGGTCCCAGAGGCCAGCAGCCCGCGCTGGGGAACCCTGCT |
| | CCTTGCTATTTTCCTGGCTGCATCCAGAGGTCTGGTAGCAGCCTTCAAGGTCACCA |
| | CTCCATATTCTCTCTATGTGTGTCCCGAGGGACAGAATGCCACCCTCACCTGCAGG |
| | ATTCTGGGCCCCGTGTCCAAAGGGCACGATGTGACCATCTACAAGACGTGGTACCT |
| | CAGCTCACGAGGCGAGGTCCAGATGTGCAAAGAACACCGGCCCATACGCAACTTCA |
| | CATTGCAGCACCTTCAGCACCACGGAAGCCACCTGAAAGCCAACGCCAGCCATGAC |
| | CAGCCCCAGAAGCATGGGCTAGAGCTAGCTTCTGACCACCACGGTAACTTCTCTAT |
| | CACCCTGCGCAATGTGACCCCAAGGGACAGCGGCCTCTACTGCTGTCTAGTGATAG |
| | AATTAAAAAACCACCACCCAGAACAACGGTTCTACGGGTCCATGGAGCTACAGGTA |
| | CAGGCAGGCAAAGGCTCGGGGTCCACATGCATGGCGTCTAATGAGCAGGACAGTGA |
| | CAGCATCACGGCTGCGGCCCTGGCCACCGGCGCCTGCATCGTGGGAATCCTCTGCC |
| | TCCCCCTTATCCTGCTGCTGGTCTATAAGCAGAGACAGGTGGCCTCTCACCGCCGT |
| | GCCCAGGAGTTGGTGAGGATGGACAGCAGCAACACCCAAGGAATCGAAAACCCAGG |
| | CTTCGAGACCACTCCACCCTTCCAGGGGATGCCTGAGGCCAAGACCAGGCCGCCAC |
| | TGTCCTATGTGGCCCAGCGGCAACCTTCGGAGTCAGGACGGTACCTGCTCTCTGAC |
| | CCCAGCACACCTCTGTCGCCTCCAGGCCCTGGGGACGTCTTTTTCCCATCCCTAGA |
| | TCCAGTCCCTGACTCCCCTAACTCTGAAGCCATCTAAACCAGCTGGGGAACCATGA |
| | ACCATGGTACCTGGGTCAGGGATATGTGCACTTGATCTATGGCTGGCCCTTGGACA |
| | GTCTTTTAGGCACTGACTCCAGCTTCCTTGCTCCTGCTCTGAGCCTAGACTCTGCT |
| | TTTACAAGATGCACAGACCCTCCCCTATCTCTTTCAGACGCTACTTGGGGGGCAGG |
| | GAGAAGATGTTGGATTGCTCATTGCTGTTCTCAAGATCTTGGGATGCTGAGTTCTC |
| | CCTAGAGACTTGACTTCGACAGCCACAGATGTCAGATGACCTGCATCCTATGAACG |
| | TCCGGCTTGGCAAGAGCCTTTCTTCATGGAAACCAGTAGCCCGGAGGGGATGAGGT |
| | AGGCACCTTGCCACCCTCCCGGGAGAGAGACACAAGATGTGAGAGACTCCTGCTCA |
| | CTGTGGGGGTGTGGCTGGCCTGCTTGTTTGCCTGAGGATGCTCCTCTGTTGGACTG |
| | ACTCTATCCCCCTGGATTCTGGAGCTTGGCTGGCCTATGTCCCACCAGAGGAGCAT |
| | CTCAGCAGCCTTCCACCAGCAACCTGAGGGCCTGCCAGCTTCGTGGCTCTGGGCTC |
| | TCATTACCTGTATGGCCGTCCACAGAGCTCAGTGGCCAGAGGCTTTGAAACAGGAA |
| | GTACATGTCAGGTTCAGGAACCACTGTGAGCTCATTAGTGTCTTGAGCAATGTGAG |
| | GCCTGGACCAGTGGACACGGAGGGAGGGTGGCGAGAGGATGATGGGGATGATGAGG |
| | GGAACACGCTCCCTTCCTGTCCTTGTCATCCACCACTACCACTATTCAGTGTGGAG |
| | CAGTGGCAAAGGTGACCGACCTCCACAATGTCCTAGTGATGCTGGACCATTTCTAA |
| | GTGTGAAAGAGATGCTATTAAAAACAGTATGTGGCAATGGCTGCCAACAGCTGAGT |
| | GGACTGGAGGCACTGGCTTTAAGGCCCTGGAGGTGCAGGGCCCGGTATGGGGATAG |
| | GGATGGGAGTTTCAGTGAGGGCCTAGGGATCACTCCGCTTCTGACCACTCTTCTTC |
| | TGAGCCTCACCTCAGGGTGACCTTCAGGCACACAGAAGAGCTTGCCCCTGGTCCGA |
| | TACTACTCTTGGCTCTCATCTCCAGGGTTTGGCATGACCTGGGCACACAGGGGGAG |
| | TCTTCAGAAAGGATTTTAAAGCATGAAAAGAAAGGGTAGTTCTTGTGAGGTAGGGA |
| | TGGGCAGCTGATGTTTGAGAGTGAGGAGGGATACGGCTGGGCAGATCACTCTCCAG |
| | TCTCTAGAGGGAAAGTAGCTCTAAGTCTGGGAGAGCAGCAGCCCAGTGGTACCATA |
| | TGTCTTCTTGCAGCTTCCACTGGCTGGGCTGAACTGGGCATGGGTAGGAAAGCTCC |
| | TGTTCTGGGCCTGCAGCCAGGGAGAACCCCATTCATTCCCTGAGGACAGATGGGTG |
| | GGGAGAGAAGAGAGAGTTTCAGGCCGGGAAGCAGCAATAAGCTATCTGCTGGGGAC |
| | CCAGACAAGTTGTCTGATGAGGTCCAAGATGTGGGATGCCAGTTATACCTGGGGCT |
| | TGGGGATCCTTAGAGGCTTTGTATCATCATCATAGGAGTGTCGGGGTGGCCAGGGC |
| | ATCAAAGCCATGACCCCTGTTTTATCCTCAGGGTCCACTCTTCTGCACCATCCATT |
| | GCTCTAGATCTATGCAGTTACTATAGACAGAATGTGTTGTTCTGTTTGGCTTTGGG |
| | GATAATGGCCTGGCGAACTGCCAGCTGTTCAGTGGCAGGGCTGTGAGGCCAGTCAA |
| | AGACTAGAACCCACAGACCAGCTGAACGATGAGTATAGCCTGTCCCCTGGGGGAGC |
| | CTGACCTGTCTCCAGCCCTAAGCTTCAGACCTCACCACTCAGATGACTTCTAAGAA |
| | TTTGCCTGTGGGGACCCCTGCATGGCTGCAGCTCCGTGGAAAGGAGAGGAGGCCCC |
| | CAGCAGAAGAACCACTCGCTTCCTGCCCAGCTTCCTCCTGTAGGGCTCTAAGTCTC |
| | TTCTTCTTGGGACCCTGCAAGCAAAGGCATGTCAGCTTGGTGGTTTCCTGTTTTGG |
| | GTGAAGTTTTGTGTGGTCCGGGTTCTGTCTACATCCATGAACTTGGGTGCTACCAC |
| | CTTGCTGCTGCTGTAGAGACAGCTGCAGGATCTTAGGGTGGAAAATGGAGGTGCCC |
| | TGAGGTGCTAGCCCTTGGGGCAAAAGATGGGGTGGCAATGAGACACAGTGGGGAAC |
| | TGAGTTCCCCAAGAGGAGGGAGGAGCCCTGTAGCCTCAAGGGCCATATTGGGTTCC |
| | TGGTACCAGCAAAAGCCTAGAGAGCGAAGTCTGTATTTTGAGGAGGTAATTGATCC |
| | TTACGGAATCCATCAGAAATTTGGAGCGGGTGCTTTATCTATCTCTGGAGGGTCTC |
| | TACCTATCTCCGATGAAGCTCTCCCTGGGCCTGGGATGGGAGAAACCAGGAGGAAA |
| | GGTGTCTGATAAAGCAGGGGCTTCTTGACAAGCCAAAGGGCCACTGGTAGCTGTTG |
| | TGGACCGAGCTGACCCTGCTGAAGTATTGTAGTGTGCCTTGGACCAACTTCTCAAA |
| | AGAGCAACCCCGGGGCTACCCTACTTCTGCCAGGAAGAGGCGGAGAAGGGGCTGAG |
| | AGGCCTGGAAGGGGCTAGCTCCTTCTTTGAGAACTGCTCCCCGGAGGACTTGGAGG |
| | AGGCGGCTAGGCTACGGGCTGCTGAGGGCCCTTTGTCTTTCCTAACCTGGGCACTG |
| | TTAGGATGCTCCCTCCTGGAAAAGGCTTTCCTGGGTGTGAGCTAGAGCAGTGTCCA |
| | TGCCAGCGCTGAACCTGCCATGGTGGGAGCTGAACTAAAAATTTCTCAGGGAACTA |
| | AAATAGGCAAAAGAGGAACTGGGGGAGGAGGGTGCCAGGCAGGATGGGGGGAAGGG |
| | AGGGCAGTGCAAAAGTCTCTTGAAACACAGACAGCCCAGCTGAGTGCCAGTCCCAG |
| | ATCACAGAGAATACGGCTCATCTGGCTCATGTTCTGCATGCTTGCTGCTTTACCCT |
| | GGCACTTTCCTTCTCCACCATGAGTGCGAGTCCTGGGAGTCCTGGGAGGGTGAGGA |
| | TTAATGCCAGCCTGGGGAGCAGATAGCTGACAGAGTCCTTGGGTAACTGGCTTGAA |
| | CCAGGACCTCAGGATTCCACTCTGGGGATCTAGCTTTGTCTGGGCCAGTGAAGATC |
| | TCTATAATGGCATTATTGCCAGGGGATAAACATTTCACTGGGTTCTGATCTGTTGG |
| | GTGTGGCTTCCTGGAAAATATGGTGAGAGGAATTCTGCTAAGGATACAGTTGATAA |
| | GAAAGTTCTGAGATTGATTAGTAATGCCTGCCTTGGACTCAGGAAGGGAAGTGGCA |
| | GTATGAATGCCATGTCTTAATCATTTTGGTTAAAATATGCTTCCCAAAAGATTTCC |
| | ACGTGTGTTCTTGTTTATTTGACATCTGTCTCCATATCAGTCTTGAAAGCCTTTCT |
| | GTGTGTATATATATGATGTTTGCGTGTATATATGTTTTTGTGTGTGCATATGGAAG |
| | TCAGAAATCACTGGGTGTCTTCCTCCATTCCTTTGCAATGTATGTTTTTTTTTTTT |
| | TTACGATTTATTTACTATATGAATGTTTTGCCTGAATACATGCATAGGTGTCACGT |
| | ACATGCCTGCTGGAACGCTTGGAACTGGAGTTACAGGTGGCTATGAGCTACAGTGT |
| | GAGCACTGGGAATCAAACCTGGGTCTTCTGCAAGAGCAACAAATTAAAAGTCAGCT |
| | CTTAACTACTTGAGCTATTTTTCCAACTCC (SEQ ID NO: 63) |
| | >NP_083008.1 V-type immunoglobulin domain-containing |
| | suppressor of T-cell activation isoform 1 precursor [Mus |
| | musculus] |
| | MGVPAVPEASSPRWGTLLLAIFLAASRGLVAAFKVTTPYSLYVCPEGQNATLTCRI |
| | LGPVSKGHDVTIYKTWYLSSRGEVQMCKEHRPIRNFTLQHLQHHGSHLKANASHDQ |
| | PQKHGLELASDHHGNFSITLRNVTPRDSGLYCCLVIELKNHHPEQRFYGSMELQVQ |
| | AGKGSGSTCMASNEQDSDSITAAALATGACIVGILCLPLILLLVYKQRQVASHRRA |
| | QELVRMDSSNTQGIENPGFETTPPFQGMPEAKTRPPLSYVAQRQPSESGRYLLSDP |
| | STPLSPPGPGDVFFPSLDPVPDSPNSEAI (SEQ ID NO: 64) |
| Human B7-H7 | >NM_007072.4 Homo sapiens HERV-H LTR-associating 2 |
| (HHLA2) | (HHLA2), transcript variant 1, mRNA |
| | AGTTCTCTTCAAGTCATGTAATCGACTTTTTTGAATTAGTTTTCAGTTTCATTTTG |
| | TTTTCCCTAATTCAAGTTGGGAACACTTCATTTTCCCCAATTCAAGTTGGGAACAC |
| | TTCCTTGGTATTTCCTTGCTACATGGACTTTAGCAAATGCTACTTTACTCTCCTTC |
| | CAGCTACTCAGGAGGCTGAGGCAGGAGAATCGCTTGAACCCGGGAGGCGGAGGTTA |
| | CAGTGAGCCTTTTCCTAGTTTTACTGTTGGAAGCCTAACTCACAGGAGAGATTATG |
| | CAATACAGTCCTGAAGTCAAGGGAGGAGAGCATGTAGGAGAATACTAACCCTGCAC |
| | AGATTGTGATGGTGATGTGGAATATACTAAAGCCTAGAACGCACCTCCTCTGCATG |
| | ACTAATATGTTCTGCACAAGACATGAAGGCACAGACAGCACTGTCTTTCTTCCTCA |
| | TTCTCATAACATCTCTGAGTGGATCTCAAGGCATATTCCCTTTGGCTTTCTTCATT |
| | TATGTTCCTATGAATGAACAAATCGTCATTGGAAGACTTGATGAAGATATAATTCT |
| | CCCTTCTTCATTTGAGAGGGGATCCGAAGTCGTAATACACTGGAAGTATCAAGATA |
| | GCTATAAGGTTCACAGTTACTACAAAGGCAGTGACCATTTGGAAAGCCAAGATCCC |
| | AGATATGCAAACAGGACATCCCTTTTCTATAATGAGATTCAAAATGGGAATGCGTC |
| | GCTATTTTTCAGAAGAGTAAGCCTTCTGGACGAAGGAATTTACACCTGCTATGTAG |
| | GAACAGCAATTCAAGTGATTACAAACAAAGTGGTGCTAAAGGTGGGAGTTTTTCTC |
| | ACACCCGTGATGAAGTATGAAAAGAGGAACACAAACAGCTTCTTAATATGCAGCGT |
| | GTTAAGTGTTTATCCTCGTCCAATTATCACGTGGAAAATGGACAACACACCTATCT |
| | CTGAAAACAACATGGAAGAAACAGGGTCTTTGGATTCTTTTTCTATTAACAGCCCA |
| | CTGAATATTACAGGATCAAATTCATCTTATGAATGTACAATTGAAAATTCACTGCT |
| | GAAGCAAACATGGACAGGGCGCTGGACGATGAAAGATGGCCTTCATAAAATGCAAA |
| | GTGAACACGTTTCACTCTCATGTCAACCTGTAAATGATTATTTTTCACCAAACCAA |
| | GACTTCAAAGTTACTTGGTCCAGAATGAAAAGTGGGACTTTCTCTGTCCTGGCTTA |
| | CTATCTGAGCTCCTCACAAAATACAATTATCAATGAATCCCGATTCTCATGGAACA |
| | AAGAGCTGATAAACCAGAGTGACTTCTCTATGAATTTGATGGATCTTAATCTTTCA |
| | GACAGTGGGGAATATTTATGCAATATTTCTTCGGATGAATATACTTTACTTACCAT |
| | CCACACAGTGCATGTAGAACCGAGCCAAGAAACAGCTTCCCATAACAAAGGCTTAT |
| | GGATTTTGGTGCCCTCTGCGATTTTGGCAGCTTTTCTGCTGATTTGGAGCGTAAAA |
| | TGTTGCAGAGCCCAGCTAGAAGCCAGGAGGAGCAGACACCCTGCTGATGGAGCCCA |
| | ACAAGAAAGATGTTGTGTCCCTCCTGGTGAGCGCTGTCCCAGTGCACCCGATAATG |
| | GCGAAGAAAATGTGCCTCTTTCAGGAAAAGTATAGGAAATGAGAGAAGACTGTGAC |
| | AACTCATGACCTGCATCCTTAATATCCAGTGACTTCATCTCCCCTTTCTTCACCAC |
| | AATTCCAGGCAATGGCCTGTCGGAGCAGACAATTCTACCACTGCAAAGAGTTGTAA |
| | CCATTTTCTGGTATCACATTTATTTTTCAAGACATACTTTTCAAGACATCATTCAC |
| | TGACCCACTACCTGCATTGAGTATAAATGCCTGGATGTTAAGGATTCCAATTTAAC |
| | TTTGAAAAGAACTGTCTCATTCATTTACATTTCTGTTACAGTCAGCCCAGGAGGTT |
| | ACAGTGAGCTCTCCACTAAGAATCTGGAAGAAATGCATCACTAGGGGTTGATTCCC |
| | AATCTGATCAACTGATAATGGGTGAGAGAGCAGGTAAGAGCCAAAGTCACCTTAGT |
| | GGAAAGGTTAAAAACCAGAGCCTGGAAACCAAGATGATTGATTTGACAAGGTATTT |
| | TAGTCTAGTTTTATATGAACGGTTGTATCAGGGTAACCAACTCGATTTGGGATGAA |
| | TCTTAGGGCACCAAAGACTAAGACAGTATCTTTAAGATTGCTAGGGAAAAGGGCCC |
| | TATGTGTCAGGCCTCTGAGCCCAAGCCAAGCATCGCATCCCCTGTGATTTGCACGT |
| | ATACATCCAGATGGCCTAAAGTAACTGAAGATCCACAAAAGAAGTAAAAATAGCCT |
| | TAACTGATGACATTCCACCATTGTGATTTGTTCCTGCCCCACCCTAACTGATCAAT |
| | GTACTTTGTAATCTCCCCCACCCTTAAGAAGGTACTTTGTAATCTTCCCCACCCTT |
| | AAGAAGGTTCTTTGTAATTCTCCCCACCCTTGAGAATGTACTTTGTGAGATCCACC |
| | CTGCCCACAAAACATTGCTCTTAACTTCACCGCCTAACCCAAAACCTATAAGAACT |
| | AATGATAATCCATCACCCTTCGCTGACTCTCTTTTCGGACTCAGCCCACCTGCACC |
| | CAGGTGAAATAAACAGCTTTATTGCTCACACAAA (SEQ ID NO: 65) |
| | >NP_009003.1 HERV-H LTR-associating protein 2 isoform a |
| | precursor [Homo sapiens] |
| | MKAQTALSFFLILITSLSGSQGIFPLAFFIYVPMNEQIVIGRLDEDIILPSSFERG |
| | SEVVIHWKYQDSYKVHSYYKGSDHLESQDPRYANRTSLFYNEIQNGNASLFFRRVS |
| | LLDEGIYTCYVGTAIQVITNKVVLKVGVFLTPVMKYEKRNTNSFLICSVLSVYPRP |
| | IITWKMDNTPISENNMEETGSLDSFSINSPLNITGSNSSYECTIENSLLKQTWTGR |
| | WTMKDGLHKMQSEHVSLSCQPVNDYFSPNQDFKVTWSRMKSGTFSVLAYYLSSSQN |
| | TIINESRFSWNKELINQSDFSMNLMDLNLSDSGEYLCNISSDEYTLLTIHTVHVEP |
| | SQETASHNKGLWILVPSAILAAELLIWSVKCCRAQLEARRSRHPADGAQQERCCVP |
| | PGERCPSAPDNGEENVPLSGKV (SEQ ID NO: 66 |
| Mouse BTNL1 | >NM_001111094.1 Mus musculus butyrophilin-like 1 (Btnl1), |
| | mRNA |
| | ACCCTTAAATAAGAGCTGAAGATGGCTGCAGCTTTCTCCTAGACTCCTCCAGGAGA |
| | AACTCTAAAGCCAGAGCCTGGGGGCAGCATTGTGTGTCCACCTTGCCACTGAGAAC |
| | ATCTACGGAAATTGGACACTCTGGCCCCAGCATCCACACGCTTGACTGTTGGCCAC |
| | AGTAACACAGGTGTGGATGGTCCCCAGAGCCAGGGTCCAGGAGTGCACTGAGGATC |
| | CCTGGGGCTTCAAGGAACCCACAGCTCTGTCCAGACGGGAATTTTTTTCCTGAGAA |
| | CTTTCACCTGTTGCCCTCCTATGGTGAACCTGGACTTGACCTTCCACTCTGATGAT |
| | GAAGGGCTCCCCCTCCGTCCCTCCAGCTGGTTGTCTCCTCCCTCTGCTCCTCCTGC |
| | TGTTTACCGGAGTCTCTGGAGAAGTGTCTTGGTTTTCTGTGAAGGGACCAGCTGAG |
| | CCCATCACTGTCCTGCTGGGGACTGAAGCCACCCTGCCCTGCCAGCTGTCTCCTGA |
| | ACAGAGTGCAGCTCGCATGCACATCCGATGGTACCGTGCCCAGCCCACCCCTGCTG |
| | TGCTGGTGTTCCACAACGGACAGGAGCAGGGAGAGGTGCAGATGCCGGAATACAGG |
| | GGCAGGACCCAGATGGTGAGACAAGCCATTGACATGGGAAGTGTGGCTCTGCAGAT |
| | ACAGCAGGTCCAGGCCTCTGATGATGGCCTGTACCACTGTCAGTTTACAGATGGCT |
| | TCACCTCCCAAGAGGTCTCCATGGAGCTTCGAGTCATAGGTTTAGGCTCTGCCCCT |
| | CTTGTTCACATGACAGGACCTGAGAATGATGGGATCCGAGTGTTGTGCTCCTCAAG |
| | TGGCTGGTTCCCAAAACCCAAAGTGCAATGGAGAGACACCTCCGGGAACATGCTAC |
| | TGTCCTCCTCTGAGTTGCAGACCCAAGACAGAGAAGGGCTCTTCCAGGTGGAAGTG |
| | TCTCTTTTGGTCACAGATAGAGCTATTGGCAATGTGATCTGCTCCATCCAAAATCC |
| | CATGTATGACCAGGAGAAATCGAAGGCCATCCTCCTCCCAGAGCCCTTCTTCCCCA |
| | AGACGTGTCCATGGAAAGTAGCCCTGGTTTGTTCTGTCCTCATACTATTGGTCCTG |
| | CTCGGTGGGATCAGCCTTGGAATCTGGAAAGAACATCAAGTCAAAAGGAGAGAAAT |
| | TAAAAAATGGTCAAAGGAACATGAAGAAATGCTTCTGTTGAAGAAGGGGACAAAAT |
| | CTGTACTGAAGATCAGAGATGACCTCCAGGCCGACCTAGATCGGAGGAAGGCGCTG |
| | TACAAAGAAGACTGGAAGAAGGCCTTGCTGTACCCTGACTGGAGGAAGGAGCTGTT |
| | CCAGGAGGCTCCTGTGAGGATAAATTATGAAATGCCTGACCAGGACAAGACAGACT |
| | CAAGGACAGAAGAGAACAGAGGTGAGGAGACTGTCAGCAGCTCACAAGTAGACCAC |
| | AACCTCATCACACTCTCCCAGGAAGGCTTCATGTTGGGAAGATACTACTGGGAGGT |
| | GGATGTCAAGGACACAGAGGAGTGGACACTAGGAGTTTATGAGCTGTGCACTCAGG |
| | ATGCATCACTTACAGACCCCTTGAGGAAATTCAGAGTCCTGGAAAAGAATGGAGAT |
| | GGATACAGGGCTCTTGACTTCTGTTCCCAAAACATTAATTCGGAAGAACCTCTGCA |
| | ACTGAAGACACGTCCGCTGAAGATCGCCATCTTCTTGGATCAGGAAGACAATGACC |
| | TCTCTTTCTACAACATGACCGATGAGACACACATCTTTTCCTTTGCCCAGGTCCCT |
| | TTCTTGGGATCACCCTATCCTTACTTCACACGTAATTCCATGGGGCTCTCTGCAAC |
| | AGCACAGCCCTAAGTGATGTGCACAGGGAATTCAATGGGTGGGTGCTGCAGCGTGC |
| | TACCCGTAAGGCCCTCTTAGGCAGGCACAGGGGGCCTCTGACCAAGAGGCCTCTTA |
| | ACCTGAGACTCCATGAGCCTCGGGGATCAGATCCTGGACAAGATTCTCGGACCATC |
| | TGTGTCGTGCATGGTGTTATAGTTATTAATAGCCTTCCTTCTTTTGACAAAAATGT |
| | GTTTAATCATTCCTAAGATAAATGAATCCATGGCTTTCTGA (SEQ ID NO: 67) |
| | >NP_001104564.1 butyrophilin-like protein 1 precursor |
| | [Mus musculus] |
| | MMKGSPSVPPAGCLLPLLLLLFTGVSGEVSWFSVKGPAEPITVLLGTEATLPCQLS |
| | PEQSAARMHIRWYRAQPTPAVLVFHNGQEQGEVQMPEYRGRTQMVRQAIDMGSVAL |
| | QIQQVQASDDGLYHCQFTDGFTSQEVSMELRVIGLGSAPLVHMTGPENDGIRVLCS |
| | SSGWFPKPKVQWRDTSGNMLLSSSELQTQDREGLFQVEVSLLVTDRAIGNVICSIQ |
| | NPMYDQEKSKAILLPEPFFPKTCPWKVALVCSVLILLVLLGGISLGIWKEHQVKRR |
| | EIKKWSKEHEEMLLLKKGTKSVLKIRDDLQADLDRRKALYKEDWKKALLYPDWRKE |
| | LFQEAPVRINYEMPDQDKTDSRTEENRGEETVSSSQVDHNLITLSQEGFMLGRYYW |
| | EVDVKDTEEWTLGVYELCTQDASLTDPLRKFRVLEKNGDGYRALDFCSQNINSEEP |
| | LQLKTRPLKIAIFLDQEDNDLSFYNMTDETHIFSFAQVPFLGSPYPYFTRNSMGLS |
| | ATAQP (SEQ ID NO: 68) |
| Human VSIG8 | >NM_001013661.1 Homo sapiens V-set and immunoglobulin |
| | domain containing 8 (VSIG8), mRNA |
| | ACTCATTGCACCTTCCTGCCACCCCAGGCAGTGTCTGGGCCCTCAGCTCCCCCTCC |
| | CTCCACCTACCCCCTCACACCCACCACTACGACCCCACGGGATACCCAGCCCAGAC |
| | GGAGGAAACACCGAGCCTAGAGACATGAGAGTTGGAGGAGCATTCCACCTTCTACT |
| | CGTGTGCCTGAGCCCAGCACTGCTGTCTGCTGTGCGGATCAACGGGGATGGACAGG |
| | AGGTCCTGTACCTGGCAGAAGGTGATAATGTGAGGCTGGGCTGCCCCTACGTCCTG |
| | GACCCTGAGGACTATGGTCCCAATGGGCTGGACATCGAGTGGATGCAGGTCAACTC |
| | AGACCCCGCCCACCACCGAGAGAACGTGTTCCTTAGTTACCAGGACAAGAGGATCA |
| | ACCATGGCAGCCTTCCCCATCTGCAGCAGAGGGTCCGCTTTGCAGCCTCAGACCCA |
| | AGCCAGTACGATGCCTCCATCAACCTCATGAACCTGCAGGTATCTGATACAGCCAC |
| | TTATGAGTGCCGGGTGAAGAAGACCACCATGGCCACCCGGAAGGTCATTGTCACTG |
| | TCCAAGCACGACCTGCAGTGCCCATGTGCTGGACAGAGGGCCACATGACATATGGC |
| | AACGATGTGGTGCTGAAGTGCTATGCCAGTGGGGGCTCCCAGCCCCTCTCCTACAA |
| | GTGGGCCAAGATCAGTGGGCACCATTACCCCTATCGAGCTGGGTCTTACACCTCCC |
| | AGCACAGCTACCACTCAGAGCTGTCCTACCAGGAGTCCTTCCACAGCTCCATAAAC |
| | CAAGGCCTGAACAATGGGGACCTGGTGTTGAAGGATATCTCCAGAGCAGATGATGG |
| | GCTGTATCAGTGCACAGTGGCCAACAACGTGGGCTACAGTGTTTGTGTGGTGGAGG |
| | TGAAGGTCTCAGACTCCCGGCGTATAGGCGTGATCATCGGCATCGTCCTGGGCTCT |
| | CTGCTCGCGCTGGGCTGCCTGGCCGTAGGCATCTGGGGGCTCGTCTGCTGCTGCTG |
| | CGGGGGCTCCGGGGCTGGCGGCGCCCGCGGTGCCTTCGGCTACGGCAACGGCGGCG |
| | GGGTCGGCGGAGGGGCCTGCGGCGACTTGGCTAGTGAGATCAGAGAGGACGCCGTG |
| | GCGCCCGGGTGCAAGGCCAGCGGGCGCGGCAGCCGCGTCACCCACCTCCTGGGGTA |
| | CCCGACGCAGAACGTCAGCCGCTCCCTGCGCCGCAAGTACGCGCCTCCCCCCTGCG |
| | GCGGCCCCGAGGACGTGGCCCTGGCGCCCTGCACCGCCGCCGCCGCCTGCGAAGCG |
| | GGCCCCTCCCCGGTCTACGTCAAGGTCAAGAGCGCGGAGCCGGCTGACTGCGCCGA |
| | GGGGCCGGTGCAGTGCAAGAACGGCCTCTTGGTGTGAGCGCGCGCGCCGGGCCGGG |
| | CTGCGCCCCAGCCAGGAGGAGGGCGCGGGGCTCTCTGTCTGCAGCTGGGGACACGT |
| | CGGGGCTGGGGACGACCTCGCTCGCCCCAGGCTGCCAGGCGGCTGGGGGTGAAGGC |
| | ATTTCCCTAAGGAAATGCGTAGGGAGGCAGAGCCTCCTCCCCAAAAGTGGGAAGGG |
| | GCGGGCGAGGGCGGAGGAAGGCGATCCTGAGCCTTCTCCGCACCCCCGGGACCGAA |
| | GGCTTGGGGGAGAGGGAGGGAGGAGGAGGCTGAGTGTCCTAGAGCGGCTGAGGCCG |
| | GAGGCCTGGTGTCCCCAGCCTAAGCAGAGGGCCCCGGGGGCCGGGTGGGTGGGGGT |
| | CTGTCTGGACGAATTGTTCTGTGTGTGAGGTCTGAGCTCTGAGGCAGCAGTGTTAG |
| | CACAATAAAGAAACATTGAGACGTGA (SEQ ID NO: 69) |
| | >NP_001013683.1 V-set and immunoglobulin domain- |
| | containing protein 8 precursor [Homo sapiens] |
| | MRVGGAFHLLLVCLSPALLSAVRINGDGQEVLYLAEGDNVRLGCPYVLDPEDYGPN |
| | GLDIEWMQVNSDPAHHRENVFLSYQDKRINHGSLPHLQQRVRFAASDPSQYDASIN |
| | LMNLQVSDTATYECRVKKTTMATRKVIVTVQARPAVPMCWTEGHMTYGNDVVLKCY |
| | ASGGSQPLSYKWAKISGHHYPYRAGSYTSQHSYHSELSYQESFHSSINQGLNNGDL |
| | VLKDISRADDGLYQCTVANNVGYSVCVVEVKVSDSRRIGVIIGIVLGSLLALGCLA |
| | VGIWGLVCCCCGGSGAGGARGAFGYGNGGGVGGGACGDLASEIREDAVAPGCKASG |
| | RGSRVTHLLGYPTQNVSRSLRRKYAPPPCGGPEDVALAPCTAAAACEAGPSPVYVK |
| | VKSAEPADCAEGPVQCKNGLLV (SEQ ID NO: 70) |
| Mouse VSIG8 | >NM_177723.4 Mus musculus V-set and immunoglobulin domain |
| | containing 8 (Vsig8), transcript variant 1, mRNA |
| | ACTCATTGCATCTTCCTGCCACCCCGGGCAGTGTCTGGGCCCTCCGCTCCCCCTCC |
| | CTCCACCTGCCCCTTCCACCCACCACCACCAGCCCACTGGAGCCCAGCTCAGGCGG |
| | AGGAAAGACCAAGCCTAGAGACATGGGAGTTCGAGGAGCACTCCATCTTCTACTTG |
| | TGTGCCTGAGCCCAGCACTGTTGTCTGCTGTAAGGATCAACGGGGATGGCCAGGAG |
| | GTCATGTACCTGGCAGAAGGTGACAATGTGAGGCTAGGCTGTCCCTACCTCCTGGA |
| | TCCTGAGGATTTGGGTACCAACAGTCTGGACATTGAGTGGATGCAAGTCAACTCAG |
| | AGCCCTCACACAGGGAGAATGTTTTTCTTACTTATCAAGACAAGAGGATAGGTCAT |
| | GGCAACCTCCCCCATCTGCAGCAGAGGGTCCGCTTTGCAGCCTCAGACCCCAGCCA |
| | GTACGATGCCTCCATCAACCTCATGAACCTGCAGGTATCTGACACAGCAACCTATG |
| | AGTGCCGGGTGAAGAAGACCACCATGGCCACCAGGAAGGTCATTGTCACTGTCCAA |
| | GCACGTCCTGCGGTGCCCATGTGTTGGACGGAAGGCCACATGTCAAAGGGCAACGA |
| | TGTGGTGCTGAAGTGCTTTGCCAACGGAGGCTCTCAGCCCCTCTCCTACAAGTGGG |
| | CCAAGATCAGTGGGCACAGTCACCCCTACCGAGCTGGGGCTTACCACTCACAGCAC |
| | AGCTTCCACTCTGAGCTTTCTTACCAAGAGTCATTCCACAGCACCATCAACCAAGG |
| | CCTGGGCAACGGAGACCTGCTGTTGAAGGGCATCAACGCAGACGACGATGGGCTGT |
| | ATCAGTGCACAGTGGCCAACCATGTGGGCTACAGCGTCTGTGTGGTAGAGGTGAAA |
| | GTCTCAGACTCCCAGCGAGTAGGCATGATCGTTGGAGCAGTGCTGGGCTCTTTGCT |
| | CATGCTGGCCTGCCTGGCACTAGGCATCTGGGGGCTCATCTGCTGCTGCTGCGGAG |
| | GCGGCGGGGCCGGTGGTGCCCGAGGTGCCTTCGGCTACGGGGTCGGCGGCGGGGTC |
| | GGCGGAGGGGCCTGCGGCGACTTGGCTAGTGAGATCAGAGTGGACGCCGAGGCGCC |
| | CGGGTGTAAGGCCAGCGGGCGCGGCAGCCGCGTCACCCACCTCCTGGGGTACCCGA |
| | CGCAGAACGTCAGCCGCTCCCTGCGCCGCAAGTACGCGCCTCCGCCCTGCGGCGGC |
| | CCCGAGGACGTGGCCCTAGTGCCCCGCACCGCCTCCGCCTCCTGCGAAGCGGGTCC |
| | CTCCCCCGTCTACATCAAGGTCAAGAGCGCGGAGCCGGCCGACTGCGCCGACTGTG |
| | CCCAGGTCGAGCAGCGCTCGTGCAAGGACGGCCTCTTAGTGTGAGCGCACAGCACC |
| | GGGCTGCGCCCCGGCTGGGAGGTGGTTCGGGGGCTCTCTGCCCGCAGCTGGGGACA |
| | GGTTCGGGCCAGCAGACCTGGCTCTCTCATTGGCCACCTAGCGGTGGTAAGGAAAT |
| | TTCCCTCTGAGAAGCCAAGCCGGGCAGACCCTCCTCCCCTGTAGTGGGAGGAGAGG |
| | CGGGGGAGACAGAAAACAGTTCAGAGCTCTCCCTCACCCCTGGTTTCCAGGGAGAG |
| | GAAGGGAGAGGAGAGCTGTCGGTATCCCAGAACCGCAGAGGTACAACCCAGATGTC |
| | CCCAGCCAAGGCGAGGGCCCCCCAGCCCTGGGTAGGTGGATGTCAGGGCTGAATTG |
| | CTCTGTGTGTGAGATCTGAGCTCCAAGGCAACAGTGTTAGCACAATAAAGAAACTT |
| | AAAGACTGAAAAAAAAAAAAAA (SEQ ID NO: 71) |
| | >NP_808391.2 V-set and immunoglobulin domain-containing |
| | protein 8 precursor [Mus musculus] |
| | MGVRGALHLLLVCLSPALLSAVRINGDGQEVMYLAEGDNVRLGCPYLLDPEDLGTN |
| | SLDIEWMQVNSEPSHRENVFLTYQDKRIGHGNLPHLQQRVRFAASDPSQYDASINL |
| | MNLQVSDTATYECRVKKTTMATRKVIVTVQARPAVPMCWTEGHMSKGNDVVLKCFA |
| | NGGSQPLSYKWAKISGHSHPYRAGAYHSQHSFHSELSYQESFHSTINQGLGNGDLL |
| | LKGINADDDGLYQCTVANHVGYSVCVVEVKVSDSQRVGMIVGAVLGSLLMLACLAL |
| | GIWGLICCCCGGGGAGGARGAFGYGVGGGVGGGACGDLASEIRVDAEAPGCKASGR |
| | GSRVTHLLGYPTQNVSRSLRRKYAPPPCGGPEDVALVPRTASASCEAGPSPVYIKV |
| | KSAEPADCADCAQVEQRSCKDGLLV (SEQ ID NO: 72) |
| Human VSIG3 | >NM_001015887.3 Homo sapiens immunoglobulin superfamily |
| (IGSF11) | member 11 (IGSF11), transcript variant 2, mRNA |
| | AGTCCTGGGGCAGGGCTGGGTGGCACGGCTGGCGAGCCCGGAACGCCTCTGGTCAC |
| | AGCTCAGCGTCCGCGGAGCCGGGCGGCGCTGCAGCTGCACTTGGCTCGTCTGTGGG |
| | TCTGACAGTCCCAGCTCTGCGCGGGGAACAGCGGCCCGGCGCTGGGTGTGGGAGGA |
| | CCAGGCTGCCCCAAGAGCGCGGAGACTCACGCCCGCTCCTCTCCTGTTGCGACCGG |
| | GAGCCGGGTAGGAGGCAGGCGCGCTCCCTGCGGCCCCGGGATGACTTCTCAGCGTT |
| | CCCCTCTGGCGCCTTTGCTGCTCCTCTCTCTGCACGGTGTTGCAGCATCCCTGGAA |
| | GTGTCAGAGAGCCCTGGGAGTATCCAGGTGGCCCGGGGTCAGCCAGCAGTCCTGCC |
| | CTGCACTTTCACTACCAGCGCTGCCCTCATTAACCTCAATGTCATTTGGATGGTCA |
| | CTCCTCTCTCCAATGCCAACCAACCTGAACAGGTCATCCTGTATCAGGGTGGACAG |
| | ATGTTTGATGGTGCCCCCCGGTTCCACGGTAGGGTAGGATTTACAGGCACCATGCC |
| | AGCTACCAATGTCTCTATCTTCATTAATAACACTCAGTTATCAGACACTGGCACCT |
| | ACCAGTGCCTGGTCAACAACCTTCCAGACATAGGGGGCAGGAACATTGGGGTCACC |
| | GGTCTCACAGTGTTAGTTCCCCCTTCTGCCCCACACTGCCAAATCCAAGGATCCCA |
| | GGATATTGGCAGCGATGTCATCCTGCTCTGTAGCTCAGAGGAAGGCATTCCTCGAC |
| | CAACTTACCTTTGGGAGAAGTTAGACAATACCCTCAAACTACCTCCAACAGCTACT |
| | CAGGACCAGGTCCAGGGAACAGTCACCATCCGGAACATCAGTGCCCTGTCTTCAGG |
| | TTTGTACCAGTGCGTGGCTTCTAATGCTATTGGAACCAGCACCTGTCTTCTGGATC |
| | TCCAGGTTATTTCACCCCAGCCCAGGAACATTGGACTAATAGCTGGAGCCATTGGC |
| | ACTGGTGCAGTTATTATCATTTTTTGCATTGCACTAATTTTAGGGGCATTCTTTTA |
| | CTGGAGAAGCAAAAATAAAGAGGAGGAAGAAGAAGAAATTCCTAATGAAATAAGAG |
| | AGGATGATCTTCCACCCAAGTGTTCTTCTGCCAAAGCATTTCACACTGAGATTTCC |
| | TCCTCGGACAACAACACACTAACCTCTTCCAATGCCTACAACAGTCGATACTGGAG |
| | CAACAATCCAAAAGTTCATAGAAACACAGAGTCAGTCAGCCACTTCAGTGACTTGG |
| | GCCAATCTTTCTCTTTCCACTCAGGCAATGCCAACATACCATCCATTTATGCTAAT |
| | GGGACCCATCTGGTCCCGGGTCAACATAAGACTCTGGTAGTGACAGCCAACAGAGG |
| | GTCATCACCACAGGTGATGTCCAGGAGCAATGGCTCAGTCAGTAGGAAGCCTCGGC |
| | CTCCACACACTCATTCCTACACCATCAGCCACGCAACACTGGAACGAATTGGTGCA |
| | GTACCTGTCATGGTACCAGCCCAGAGTCGGGCCGGGTCCTTGGTATAGGACATGAG |
| | GAAATGTTGTGTTCAGAAATGAATAAATGGAATGCCCTCATACAAGGGGGAGGGTG |
| | GGGTGGGGAGTGCTGGGAAAGAAACACTTCCTTATAATTATATTAGTAAAATGCAC |
| | AAAGAAGAAGGCAGTGCTGTTACTTGGCCACTAAGATGTGTAAAATGGACTGAAAT |
| | GCTCCATCATGAAGACTTGCTTCCCCACCAAAGATGTCCTGGGATTCTGCTGGATC |
| | TCAAAGATGTGCCAAGCCAAGGAAAAAGATACAAGAGCAGAATAGTACTTAAAATC |
| | CAAACTGCCGCCCAGATGGGCTTGTTCTTCATGCCTAACTTAATAATTTTTAAGAG |
| | ATTAAAGTGCCAGATGGAGTTTAAATATTGAAATTATTTTAAAAGGTAGGTGTCTT |
| | TAAGAAAATAACAAGCAACCCTGTGATATGTTCCGTCTCTCCCAATTCCCTCGTTA |
| | TATAGAGGGCTTAATGGTATAAATGGTTAATATTGGTCCCAACAGGGCTGACTCTT |
| | CTATCATATAATCAAAACTTTTTACATGAGCAAAATTCAGTAAGAAATGGGGGAAG |
| | ACAAAGGAAACGTCTTTGAGAAGCCCCTTCATATTTATTTATTTATCTCTTCCTGA |
| | ACCATGAATTTCATATGTGGAATATTGCTATATTGACAGATTCTTGCCTGTCTGTG |
| | TTATTCTAGGATCTGTTACAGGTCCATGGCAATTACTGTTTATTTTTTCCTGGAAA |
| | AATATTTTTTTATAAAAGGCTTTTTTTTTTTTTTAAATACATGAGAGGCATTGGGC |
| | TAAGAAAGAAAAGACTGTTGTATAATACCTTGTTCAATGGTTGTATTTAGTGAGCT |
| | CATAGAGGTCCATCATATCATGACCGAGCTAGGTTGTGTGGGCAGGAAGGTAGGGC |
| | TAAGGGGTTGTAGCCTTGCTGGGCAGCCTCTCAGAGCAAGGTTGTTCAGATCTCCC |
| | TTGCTATTACAGTAGGTTACTATTAATGAGGGCAGCACCTGATGCCTTTTGTACTG |
| | AGGTATGTAACTTTCTCCTTATTTGACAAGTAGAAGTTAACTTACTTGTCAGGGAG |
| | GGCAGACGTTTTTTTGTTCTGTTTCGTTTTTCAAAATAATGCTTTTTGCAAAAGAG |
| | GTAAGACTGAGACTAAAGGTGTTATCTTCTGGTGTGCTCCTGGAAGTGTCTACCCT |
| | ACATTTGTGTCAGCTCAGGGTTGCAGTGTTGCCCAGATGCATTTTACATCACTGTA |
| | AAGAGATTACTTTTGTGGTTACTACCTGGCTTGGCTGGCCTTGCGGTTCACCAGAT |
| | TAATTTACAAACTCCCCCACTTTATTTTGTGCTATGTAGATCTGGCCATACTTGCA |
| | TTAGTGACTGTCTTGCCTTAACCACACTTAAGCAACCCACAAATTTCTTCTCAGAT |
| | TTGTTTCCTAGATTACTTATGATACTCATCCCATGTCTCAATAAGAGTGTCTTTTC |
| | TTTCTGGATGTGTTCTCTTACTCCCTCTTACCACCATACTTTTTGCTCTCTTCTCC |
| | TGCAAGCGTAGTCTTCACAGGGAGTGGCTTCCTGACATTTTTTTCAGTTATGTGAA |
| | TGAATGGAAACCAACAGCTGCTGCAAACACTGTTTTTCCAAGAAGGCTACACTCAG |
| | AACCTAACCATTGCCAACCATTTCAGTATTGATAAAAAGCTGAATTTACTTTAGCA |
| | TTACTTATTTTTTTTTCCATTTGATGGTTCTTACTTTGTAAAAATTTAAATAAATG |
| | AATGTCTATACTTTTTATAAAGAAAAGTGAAAATACCATGACACTGAAAAGATGAT |
| | GCTATCAGATGCTGTTTAGAAAGCATTTATCTTGCATTTCTTTATTCTTTCTAATT |
| | ATCTAAAATTCAATAAAATTTTATTCATATAAAATAAGTTGTCATTAATTATCAAT |
| | ACTAACGAGTATGTCATTTTAAAACTTAGTATTCTCTTTAATGTTACAAGA (SEQ |
| | ID NO: 73) |
| | >NP_001015887.1 immunoglobulin superfamily member 11 |
| | isoform b precursor [Homo sapiens] |
| | MTSQRSPLAPLLLLSLHGVAASLEVSESPGSIQVARGQPAVLPCTFTTSAALINLN |
| | VIWMVTPLSNANQPEQVILYQGGQMFDGAPRFHGRVGFTGTMPATNVSIFINNTQL |
| | SDTGTYQCLVNNLPDIGGRNIGVTGLTVLVPPSAPHCQIQGSQDIGSDVILLCSSE |
| | EGIPRPTYLWEKLDNTLKLPPTATQDQVQGTVTIRNISALSSGLYQCVASNAIGTS |
| | TCLLDLQVISPQPRNIGLIAGAIGTGAVIIIFCIALILGAFFYWRSKNKEEEEEEI |
| | PNEIREDDLPPKCSSAKAFHTEISSSDNNTLTSSNAYNSRYWSNNPKVHRNTESVS |
| | HFSDLGQSFSEHSGNANIPSIYANGTHLVPGQHKTLVVTANRGSSPQVMSRSNGSV |
| | SRKPRPPHTHSYTISHATLERIGAVPVMVPAQSRAGSLV (SEQ ID NO: 74) |
| Mouse VSIG3 | >NM_170599.2 Mus musculus immunoglobulin superfamily, |
| (IGSF11) | member 11 (Igsf11), mRNA |
| | CGGCTGGTGGTGGCCGCGGCGGCCGGCGAGCCCGGGACGCCCGAGCCTGCCCCGAG |
| | CCTCGGCGGAGCGGAGTGGCCTCGGCGCTCCCGTGTCCCGCTTGGTCCCACGCTGC |
| | ACCCCGCCGCCCAGGAGCCCGGCGGACGGCGGCTCCCCCGGCGGCTCCGGCATGAC |
| | TCGGCGGCGCTCCGCTCCGGCGTCCTGGCTGCTCGTGTCGCTGCTCGGTGTCGCAA |
| | CATCCCTGGAAGTGTCCGAGAGCCCAGGCAGTGTCCAGGTGGCCCGGGGCCAGACA |
| | GCAGTCCTGCCCTGCGCCTTCTCCACCAGTGCTGCCCTCCTGAACCTCAATGTCAT |
| | TTGGATGGTCATTCCCCTCTCCAATGCAAACCAGCCCGAACAGGTCATTCTTTATC |
| | AGGGTGGACAAATGTTTGACGGCGCCCTCCGGTTCCACGGGAGGGTAGGATTTACC |
| | GGCACCATGCCTGCTACCAATGTCTCGATCTTCATCAATAACACACAGCTGTCAGA |
| | TACGGGCACGTACCAGTGCTTGGTGAATAACCTTCCAGACAGAGGGGGCAGAAACA |
| | TCGGGGTCACTGGCCTCACAGTGTTAGTCCCCCCTTCTGCTCCACAATGCCAAATC |
| | CAAGGATCCCAGGACCTCGGCAGTGACGTCATCCTTCTGTGTAGTTCAGAGGAAGG |
| | CATCCCTCGGCCCACGTACCTTTGGGAGAAGTTAGATAATACGCTCAAGCTACCTC |
| | CAACAGCCACTCAGGACCAGGTCCAGGGAACAGTCACCATCCGGAATATCAGTGCC |
| | CTCTCTTCCGGTCTGTACCAGTGTGTGGCTTCTAATGCCATCGGGACCAGCACCTG |
| | TCTGCTGGACCTCCAGGTTATCTCACCCCAGCCCCGGAGCGTTGGAGTAATAGCCG |
| | GAGCGGTTGGCACCGGTGCTGTTCTTATCGTCATCTGCCTTGCACTAATTTCAGGG |
| | GCGTTCTTTTACTGGAGAAGCAAAAACAAAGAGGAGGAGGAGGAAGAAATTCCTAA |
| | TGAAATCAGAGAGGATGATCTTCCCCCTAAATGCTCTTCTGCCAAAGCCTTCCACA |
| | CGGAGATATCCTCCTCAGAAAATAACACGCTGACCTCTTCCAATACCTACAACAGT |
| | CGATACTGGAACAACAATCCAAAACCCCATAGAAACACAGAGTCTTTCAACCACTT |
| | CAGTGACTTACGCCAGTCTTTCTCTGGCAATGCAGTTATCCCATCAATCTATGCAA |
| | ATGGGAACCATCTGGTTTTGGGTCCACATAAGACTCTGGTAGTTACAGCCAACAGA |
| | GGGTCATCACCTCAGGTCTTGCCCAGGAACAATGGTTCAGTCAGCAGGAAGCCTTG |
| | GCCTCAACACACTCATTCCTACACAGTAAGCCAAATGACCCTGGAGCGCATCGGTG |
| | CAGTGCCTGTCATGGTGCCTGCCCAGAGTCGAGCAGGGTCCCTGGTATAGGATGAC |
| | TGAGGAAACCATGTTCAGAAGAGAATAAATGGACCGCCTTCAGGCAAGGGGGGAGC |
| | ACTGCCTTCAGGCAAGGGGGGAGCACTGCCTTCAGGCAAGAGGGAGAGTGGGATGG |
| | GTGAGTGCTGAAAAATAAACTTTTGTTACGATTCCATTAGCAAAAAGCACAAAGAG |
| | GAGGCGTGTGTGAAGTGGCCTGGGGTTGTTCCATAATGAAGACTCAAGAAGACTGT |
| | TTCCCCACCACAGATGTCCTGAGATTCAGTTAAAACGAAACATGCTGCATCTCCAG |
| | AGATGTGCCAAGCCAAGGAGAATGCTAGAAGCAGAGTAAAGCTTACCCCCCAAACT |
| | GTGGTCCAGCTGGACCCCTTCTTTAATTCTTGCCTAACTTAATTATTTTCAGGACC |
| | CTTCAAGTGCCAGGTGGAATTTACATAATGAAATTATTTTTTAAAAATAGGTGTCC |
| | TTAGGGAGAGAAAACAGGAGCAAGCTCATGGTCTGGCCTAGTCTCCCTCTCCCACT |
| | CCTTCTGATGACACTAGCAATGCATTCCATCTGACCTGACTTTATCATAGAGGCAA |
| | AATTGTTCAGAACACTGGCTGGAGATGGGGAGAAATAAGGAAACTTCTTGTGAACA |
| | CCCTACACACACACACACACACACACACACACACACACACACACACACACACACAC |
| | ACACACACACATTTATTTACCTCCTCCTGAACCATGAATCGTATTGGTGATTTTGC |
| | TATATTGACAGATTCTCATCTGTTACACTCTAGGATCTCTCACAGGTCTGTGGCAA |
| | TTACTGTTCATGATTTCCTGAAAAAATATTTTTTTAAAAGAAAACTATTTTTTTTA |
| | AATACTAGAGAGACAGTGGACTAGGAAAGCGAGAACTTGCCGCCTTGTCTAGTGAC |
| | TGTATTCAATGACTGAACAGAGGCCCCCCCCACCATACAAGAGTTTTAGGTGATTG |
| | AGTGGGTGGAACCAGCTGGAGCCAGGTGGGAGGGGCCTTTACATTGCCAGCAGGGC |
| | CCCAAAGAATTGAGATTGTGTATGGCAACCGTTAATGAGGACAGCGCCTGATGCCT |
| | TTTGTACCGAGGAAGATAATTGCCTCTTGTTTGACAAGTAGAGTTTAGTAGGTTAT |
| | TACAAAAAGGGCAAGAGTTGTTTTGGTTTTGTTTCTTTCAAAATAATTTTTTTTCA |
| | AAAGAATAACAAGGGTTAGGCAAATGGGGGACCTTCCTGTGTGCTCTTGGGGGTCT |
| | GCTCAGCATCTGGAAATTTGGGTGTGCGATTTTCCCTGAACACATTGCATACCAGT |
| | GTAAAAAGACTCTGCCTCCCCCCTTTTTGGCTTTTTTACTGGGCTTGGCTGGCCTT |
| | GCAGTTTACCAGATTCATTTACAGACTCTCTGCTCTGTATGGCGCCGCCTGCCATG |
| | TCTGTCTTGGTGACTATCCTGCCTTAATCACTTTGCTTTAGGGCAACTCATGGTGA |
| | TCTCTTCCAAGATCTGTTTTTAAATTGTTTGGACTACTTGAGCCACAACTCTCAGA |
| | GGACATTCCTTTTTTTTTTTTTTTTTTTTTCTCCTTTCTTCCATTGCTTTGTCCCT |
| | CTTCCCCTGTGCTTCCTGCCTTCTTTCCCTGTCCCATGGGCACAGTCCTCACAGGG |
| | AGTGGCCTCCTCTCTCCAGTGATGTAAGTGAATGGAAGCCATCACTGGCTGCACAT |
| | ACCTTTTTCAAAAGGGACACTCGGGAAGTCACTGCTGTGACCGTTTCGATGTTGAT |
| | AAGAAGGTGAATTTACTGTAGTGTTACCACCTTCTCCCCACTTGATGGTTCTTGAC |
| | TTTGTAAAAATTTAAATAAATGAATGTCTATACTTTTTAAGGAAAAGAGAAAATAC |
| | CATGTCACAGAAAAGGTGAAACTATTAGATGCTGTTTAGAAAGCATTTATCTTGCA |
| | TTTCTTTATTCTTTCTAATTACCTAAAATTCAATAAAAGTTTATTCATATAAAAAA |
| | AAAAAAAAAAAAAA (SEQ ID NO: 75) |
| | >NP_733548.2 immunoglobulin superfamily member 11 |
| | precursor [Mus musculus] |
| | MTRRRSAPASWLLVSLLGVATSLEVSESPGSVQVARGQTAVLPCAFSTSAALLNLN |
| | VIWMVIPLSNANQPEQVILYQGGQMFDGALRFHGRVGFTGTMPATNVSIFINNTQL |
| | SDTGTYQCLVNNLPDRGGRNIGVTGLTVLVPPSAPQCQIQGSQDLGSDVILLCSSE |
| | EGIPRPTYLWEKLDNTLKLPPTATQDQVQGTVTIRNISALSSGLYQCVASNAIGTS |
| | TCLLDLQVISPQPRSVGVIAGAVGTGAVLIVICLALISGAFFYWRSKNKEEEEEEI |
| | PNEIREDDLPPKCSSAKAFHTEISSSENNTLTSSNTYNSRYWNNNPKPHRNTESFN |
| | HFSDLRQSFSGNAVIPSIYANGNHLVLGPHKILVVTANRGSSPQVLPRNNGSVSRK |
| | PWPQHTHSYTVSQMTLERIGAVPVMVPAQSRAGSLV (SEQ ID NO: 76) |
| Human VSIG4 | >NM_007268.3 Homo sapiens V-set and immunoglobulin domain |
| | containing 4 (VSIG4), transcript variant 1, mRNA |
| | ACAGACGCTGGCGGCCACCAGAAGTTTGAGCCTCTTTGGTAGCAGGAGGCTGGAAG |
| | AAAGGACAGAAGTAGCTCTGGCTGTGATGGGGATCTTACTGGGCCTGCTACTCCTG |
| | GGGCACCTAACAGTGGACACTTATGGCCGTCCCATCCTGGAAGTGCCAGAGAGTGT |
| | AACAGGACCTTGGAAAGGGGATGTGAATCTTCCCTGCACCTATGACCCCCTGCAAG |
| | GCTACACCCAAGTCTTGGTGAAGTGGCTGGTACAACGTGGCTCAGACCCTGTCACC |
| | ATCTTTCTACGTGACTCTTCTGGAGACCATATCCAGCAGGCAAAGTACCAGGGCCG |
| | CCTGCATGTGAGCCACAAGGTTCCAGGAGATGTATCCCTCCAATTGAGCACCCTGG |
| | AGATGGATGACCGGAGCCACTACACGTGTGAAGTCACCTGGCAGACTCCTGATGGC |
| | AACCAAGTCGTGAGAGATAAGATTACTGAGCTCCGTGTCCAGAAACTCTCTGTCTC |
| | CAAGCCCACAGTGACAACTGGCAGCGGTTATGGCTTCACGGTGCCCCAGGGAATGA |
| | GGATTAGCCTTCAATGCCAGGCTCGGGGTTCTCCTCCCATCAGTTATATTTGGTAT |
| | AAGCAACAGACTAATAACCAGGAACCCATCAAAGTAGCAACCCTAAGTACCTTACT |
| | CTTCAAGCCTGCGGTGATAGCCGACTCAGGCTCCTATTTCTGCACTGCCAAGGGCC |
| | AGGTTGGCTCTGAGCAGCACAGCGACATTGTGAAGTTTGTGGTCAAAGACTCCTCA |
| | AAGCTACTCAAGACCAAGACTGAGGCACCTACAACCATGACATACCCCTTGAAAGC |
| | AACATCTACAGTGAAGCAGTCCTGGGACTGGACCACTGACATGGATGGCTACCTTG |
| | GAGAGACCAGTGCTGGGCCAGGAAAGAGCCTGCCTGTCTTTGCCATCATCCTCATC |
| | ATCTCCTTGTGCTGTATGGTGGTTTTTACCATGGCCTATATCATGCTCTGTCGGAA |
| | GACATCCCAACAAGAGCATGTCTACGAAGCAGCCAGGGCACATGCCAGAGAGGCCA |
| | ACGACTCTGGAGAAACCATGAGGGTGGCCATCTTCGCAAGTGGCTGCTCCAGTGAT |
| | GAGCCAACTTCCCAGAATCTGGGCAACAACTACTCTGATGAGCCCTGCATAGGACA |
| | GGAGTACCAGATCATCGCCCAGATCAATGGCAACTACGCCCGCCTGCTGGACACAG |
| | TTCCTCTGGATTATGAGTTTCTGGCCACTGAGGGCAAAAGTGTCTGTTAAAAATGC |
| | CCCATTAGGCCAGGATCTGCTGACATAATTGCCTAGTCAGTCCTTGCCTTCTGCAT |
| | GGCCTTCTTCCCTGCTACCTCTCTTCCTGGATAGCCCAAAGTGTCCGCCTACCAAC |
| | ACTGGAGCCGCTGGGAGTCACTGGCTTTGCCCTGGAATTTGCCAGATGCATCTCAA |
| | GTAAGCCAGCTGCTGGATTTGGCTCTGGGCCCTTCTAGTATCTCTGCCGGGGGCTT |
| | CTGGTACTCCTCTCTAAATACCAGAGGGAAGATGCCCATAGCACTAGGACTTGGTC |
| | ATCATGCCTACAGACACTATTCAACTTTGGCATCTTGCCACCAGAAGACCCGAGGG |
| | AGGCTCAGCTCTGCCAGCTCAGAGGACCAGCTATATCCAGGATCATTTCTCTTTCT |
| | TCAGGGCCAGACAGCTTTTAATTGAAATTGTTATTTCACAGGCCAGGGTTCAGTTC |
| | TGCTCCTCCACTATAAGTCTAATGTTCTGACTCTCTCCTGGTGCTCAATAAATATC |
| | TAATCATAACAGCAA (SEQ ID NO: 77) |
| | >NP_009199.1 V-set and immunoglobulin domain-containing |
| | protein 4 isoform 1 precursor [Homo sapiens] |
| | MGILLGLLLLGHLTVDTYGRPILEVPESVTGPWKGDVNLPCTYDPLQGYTQVLVKW |
| | LVQRGSDPVTIFLRDSSGDHIQQAKYQGRLHVSHKVPGDVSLQLSTLEMDDRSHYT |
| | CEVTWQTPDGNQVVRDKITELRVQKLSVSKPTVTTGSGYGFTVPQGMRISLQCQAR |
| | GSPPISYIWYKQQTNNQEPIKVATLSTLLFKPAVIADSGSYFCTAKGQVGSEQHSD |
| | IVKFVVKDSSKLLKTKTEAPTTMTYPLKATSTVKQSWDWTTDMDGYLGETSAGPGK |
| | SLPVFAIILIISLCCMVVFTMAYIMLCRKTSQQEHVYEAARAHAREANDSGETMRV |
| | AIFASGCSSDEPTSQNLGNNYSDEPCIGQEYQIIAQINGNYARLLDTVPLDYEFLA |
| | TEGKSVC (SEQ ID NO: 78) |
| Mouse VSIG4 | >NM_177789.5 Mus musculus V-set and immunoglobulin domain |
| | containing 4 (Vsig4), mRNA |
| | AGCTACCAGCACTTCCAGGTTCTTCAGCAGCAAGAGGATGGAAGGATGAATAGAAG |
| | TAGCTTCAAATAGGATGGAGATCTCATCAGGCTTGCTGTTCCTGGGCCACCTAATA |
| | GTGCTCACCTATGGCCACCCCACCCTAAAAACACCTGAGAGTGTGACAGGGACCTG |
| | GAAAGGAGATGTGAAGATTCAGTGCATCTATGATCCCCTGAGAGGCTACAGGCAAG |
| | TTTTGGTGAAATGGCTGGTAAGACACGGCTCTGACTCCGTCACCATCTTCCTACGT |
| | GACTCCACTGGAGACCATATCCAGCAGGCAAAGTACAGAGGCCGCCTGAAAGTGAG |
| | CCACAAAGTTCCAGGAGATGTGTCCCTCCAAATAAATACCCTGCAGATGGATGACA |
| | GGAATCACTATACATGTGAGGTCACCTGGCAGACTCCTGATGGAAACCAAGTAATA |
| | AGAGATAAGATCATTGAGCTCCGTGTTCGGAAATATAATCCACCTAGAATCAATAC |
| | TGAAGCACCTACAACCCTGCACTCCTCTTTGGAAGCAACAACTATAATGAGTTCAA |
| | CCTCTGACTTGACCACTAATGGGACTGGAAAACTTGAGGAGACCATTGCTGGTTCA |
| | GGGAGGAACCTGCCAATCTTTGCCATAATCTTCATCATCTCCCTTTGCTGCATAGT |
| | AGCTGTCACCATACCTTATATCTTGTTCCGCTGCAGGACATTCCAACAAGAGTATG |
| | TCTATGGAGTGAGCAGGGTGTTTGCCAGGAAGACAAGCAACTCTGAAGAAACCACA |
| | AGGGTGACTACCATCGCAACTGATGAACCAGATTCCCAGGCTCTGATTAGTGACTA |
| | CTCTGATGATCCTTGCCTCAGCCAGGAGTACCAAATAACCATCAGATCAACAATGT |
| | CTATTCCTGCCTGCTGAACACAGTTTCCAGAAACTAAGAAGTTCTTGCTACTGAAG |
| | AAAATAACATCTGCTAAAATGCCCCTACTAAGTCAAGGTCTACTGGCGTAATTACC |
| | TGTTACTTATTTACTACTTGCCTTCAACATAGCTTTCTCCCTGGCTTCCTTTCTTC |
| | TTAGACAACCTAAAGTATCTATCTAGTCTGCCAATTCTGGGGCCATTGAGAAATCC |
| | TGGGTTTGGCTAAGAATATACTACATGCACCTCAAGAAATCTAGCTTCTGGGCTTC |
| | ACCCAGAACAATTTTCTTCCTAGGGCCTTCACAACTCTTCTCCAAACAGCAGAGAA |
| | ATTCCATAGCAGTAGAGGTTCTTTATCATGCCTCCAGACAGCGTGAGTCTCAGTCC |
| | TACAAACTCAGACAAGCACATGGGTCTAGGATTACTCCTCTTTCTCTAGGGCCAGA |
| | TGACTTTTAATTGATATTACTATTGCTACATTATGAATCTAATGCACATGTATTCT |
| | TTTGTTGTTAATAAATGTTTAATCATGACATCAA (SEQ ID NO: 79) |
| | >NP_808457.1 V-set and immunoglobulin domain-containing |
| | protein 4 precursor [Mus musculus] |
| | MEISSGLLFLGHLIVLTYGHPTLKTPESVTGTWKGDVKIQCIYDPLRGYRQVLVKW |
| | LVRHGSDSVTIFLRDSTGDHIQQAKYRGRLKVSHKVPGDVSLQINTLQMDDRNHYT |
| | CEVTWQTPDGNQVIRDKIIELRVRKYNPPRINTEAPTTLHSSLEATTIMSSTSDLT |
| | TNGTGKLEETIAGSGRNLPIFAIIFIISLCCIVAVTIPYILFRCRTFQQEYVYGVS |
| | RVFARKTSNSEETTRVTTIATDEPDSQALISDYSDDPCLSQEYQITIRSTMSIPAC |
| | (SEQ ID NO: 80) |
| Human Tim-3 | >NM_032782.5 Homo sapiens hepatitis A virus cellular |
| (HAVCR2) | receptor 2 (HAVCR2), mRNA |
| | ATTTGGAGAGTTAAAACTGTGCCTAACAGAGGTGTCCTCTGACTTTTCTTCTGCAA |
| | GCTCCATGTTTTCACATCTTCCCTTTGACTGTGTCCTGCTGCTGCTGCTGCTACTA |
| | CTTACAAGGTCCTCAGAAGTGGAATACAGAGCGGAGGTCGGTCAGAATGCCTATCT |
| | GCCCTGCTTCTACACCCCAGCCGCCCCAGGGAACCTCGTGCCCGTCTGCTGGGGCA |
| | AAGGAGCCTGTCCTGTGTTTGAATGTGGCAACGTGGTGCTCAGGACTGATGAAAGG |
| | GATGTGAATTATTGGACATCCAGATACTGGCTAAATGGGGATTTCCGCAAAGGAGA |
| | TGTGTCCCTGACCATAGAGAATGTGACTCTAGCAGACAGTGGGATCTACTGCTGCC |
| | GGATCCAAATCCCAGGCATAATGAATGATGAAAAATTTAACCTGAAGTTGGTCATC |
| | AAACCAGCCAAGGTCACCCCTGCACCGACTCGGCAGAGAGACTTCACTGCAGCCTT |
| | TCCAAGGATGCTTACCACCAGGGGACATGGCCCAGCAGAGACACAGACACTGGGGA |
| | GCCTCCCTGATATAAATCTAACACAAATATCCACATTGGCCAATGAGTTACGGGAC |
| | TCTAGATTGGCCAATGACTTACGGGACTCTGGAGCAACCATCAGAATAGGCATCTA |
| | CATCGGAGCAGGGATCTGTGCTGGGCTGGCTCTGGCTCTTATCTTCGGCGCTTTAA |
| | TTTTCAAATGGTATTCTCATAGCAAAGAGAAGATACAGAATTTAAGCCTCATCTCT |
| | TTGGCCAACCTCCCTCCCTCAGGATTGGCAAATGCAGTAGCAGAGGGAATTCGCTC |
| | AGAAGAAAACATCTATACCATTGAAGAGAACGTATATGAAGTGGAGGAGCCCAATG |
| | AGTATTATTGCTATGTCAGCAGCAGGCAGCAACCCTCACAACCTTTGGGTTGTCGC |
| | TTTGCAATGCCATAGATCCAACCACCTTATTTTTGAGCTTGGTGTTTTGTCTTTTT |
| | CAGAAACTATGAGCTGTGTCACCTGACTGGTTTTGGAGGTTCTGTCCACTGCTATG |
| | GAGCAGAGTTTTCCCATTTTCAGAAGATAATGACTCACATGGGAATTGAACTGGGA |
| | CCTGCACTGAACTTAAACAGGCATGTCATTGCCTCTGTATTTAAGCCAACAGAGTT |
| | ACCCAACCCAGAGACTGTTAATCATGGATGTTAGAGCTCAAACGGGCTTTTATATA |
| | CACTAGGAATTCTTGACGTGGGGTCTCTGGAGCTCCAGGAAATTCGGGCACATCAT |
| | ATGTCCATGAAACTTCAGATAAACTAGGGAAAACTGGGTGCTGAGGTGAAAGCATA |
| | ACTTTTTTGGCACAGAAAGTCTAAAGGGGCCACTGATTTTCAAAGAGATCTGTGAT |
| | CCCTTTTTGTTTTTTGTTTTTGAGATGGAGTCTTGCTCTGTTGCCCAGGCTGGAGT |
| | GCAATGGCACAATCTCGGCTCACTGCAAGCTCCGCCTCCTGGGTTCAAGCGATTCT |
| | CCTGCCTCAGCCTCCTGAGTGGCTGGGATTACAGGCATGCACCACCATGCCCAGCT |
| | AATTTGTTGTATTTTTAGTAGAGACAGGGTTTCACCATGTTGGCCAGTGTGGTCTC |
| | AAACTCCTGACCTCATGATTTGCCTGCCTCGGCCTCCCAAAGCACTGGGATTACAG |
| | GCGTGAGCCACCACATCCAGCCAGTGATCCTTAAAAGATTAAGAGATGACTGGACC |
| | AGGTCTACCTTGATCTTGAAGATTCCCTTGGAATGTTGAGATTTAGGCTTATTTGA |
| | GCACTGCCTGCCCAACTGTCAGTGCCAGTGCATAGCCCTTCTTTTGTCTCCCTTAT |
| | GAAGACTGCCCTGCAGGGCTGAGATGTGGCAGGAGCTCCCAGGGAAAAACGAAGTG |
| | CATTTGATTGGTGTGTATTGGCCAAGTTTTGCTTGTTGTGTGCTTGAAAGAAAATA |
| | TCTCTGACCAACTTCTGTATTCGTGGACCAAACTGAAGCTATATTTTTCACAGAAG |
| | AAGAAGCAGTGACGGGGACACAAATTCTGTTGCCTGGTGGAAAGAAGGCAAAGGCC |
| | TTCAGCAATCTATATTACCAGCGCTGGATCCTTTGACAGAGAGTGGTCCCTAAACT |
| | TAAATTTCAAGACGGTATAGGCTTGATCTGTCTTGCTTATTGTTGCCCCCTGCGCC |
| | TAGCACAATTCTGACACACAATTGGAACTTACTAAAAATTTTTTTTTACTGTT |
| | (SEQ ID NO: 81) |
| | >NP_116171.3 hepatitis A virus cellular receptor 2 |
| | precursor [Homo sapiens] |
| | MFSHLPFDCVLLLLLLLLTRSSEVEYRAEVGQNAYLPCFYTPAAPGNLVPVCWGKG |
| | ACPVFECGNVVLRTDERDVNYWTSRYWLNGDFRKGDVSLTIENVTLADSGIYCCRI |
| | QIPGIMNDEKFNLKLVIKPAKVTPAPTRQRDFTAAFPRMLTTRGHGPAETQTLGSL |
| | PDINLTQISTLANELRDSRLANDLRDSGATIRIGIYIGAGICAGLALALIFGALIF |
| | KWYSHSKEKIQNLSLISLANLPPSGLANAVAEGIRSEENIYTIEENVYEVEEPNEY |
| | YCYVSSRQQPSQPLGCRFAMP (SEQ ID NO: 82) |
| Mouse Tim-3 | >NM_134250.2 Mus musculus hepatitis A virus cellular |
| (HAVCR2) | receptor 2 (Havcr2), mRNA |
| | ACCATTTTAACCGAGGAGCTAAAGCTATCCCTACACAGAGCTGTCCTTGGATTTCC |
| | CCTGCCAAGTACTCATGTTTTCAGGTCTTACCCTCAACTGTGTCCTGCTGCTGCTG |
| | CAACTACTACTTGCAAGGTCATTGGAAAATGCTTATGTGTTTGAGGTTGGTAAGAA |
| | TGCCTATCTGCCCTGCAGTTACACTCTATCTACACCTGGGGCACTTGTGCCTATGT |
| | GCTGGGGCAAGGGATTCTGTCCTTGGTCACAGTGTACCAACGAGTTGCTCAGAACT |
| | GATGAAAGAAATGTGACATATCAGAAATCCAGCAGATACCAGCTAAAGGGCGATCT |
| | CAACAAAGGAGACGTGTCTCTGATCATAAAGAATGTGACTCTGGATGACCATGGGA |
| | CCTACTGCTGCAGGATACAGTTCCCTGGTCTTATGAATGATAAAAAATTAGAACTG |
| | AAATTAGACATCAAAGCAGCCAAGGTCACTCCAGCTCAGACTGCCCATGGGGACTC |
| | TACTACAGCTTCTCCAAGAACCCTAACCACGGAGAGAAATGGTTCAGAGACACAGA |
| | CACTGGTGACCCTCCATAATAACAATGGAACAAAAATTTCCACATGGGCTGATGAA |
| | ATTAAGGACTCTGGAGAAACGATCAGAACTGCTATCCACATTGGAGTGGGAGTCTC |
| | TGCTGGGTTGACCCTGGCACTTATCATTGGTGTCTTAATCCTTAAATGGTATTCCT |
| | GTAAGAAAAAGAAGTTATCGAGTTTGAGCCTTATTACACTGGCCAACTTGCCTCCA |
| | GGAGGGTTGGCAAATGCAGGAGCAGTCAGGATTCGCTCTGAGGAAAATATCTACAC |
| | CATCGAGGAGAACGTATATGAAGTGGAGAATTCAAATGAGTACTACTGCTACGTCA |
| | ACAGCCAGCAGCCATCCTGACCGCCTCTGGACTGCCACTTTTAAAGGCTCGCCTTC |
| | ATTTCTGACTTTGGTATTTCCCTTTTTGAAAACTATGTGATATGTCACTTGGCAAC |
| | CTCATTGGAGGTTCTGACCACAGCCACTGAGAAAAGAGTTCCAGTTTTCTGGGGAT |
| | AATTAACTCACAAGGGGATTCGACTGTAACTCATGCTACATTGAAATGCTCCATTT |
| | TATCCCTGAGTTTCAGGGATCGGATCTCCCACTCCAGAGACTTCAATCATGCGTGT |
| | TGAAGCTCACTCGTGCTTTCATACATTAGGAATGGTTAGTGTGATGTCTTTGAGAC |
| | ATAGAGGTTTGTGGTATATCTGCAAAGCTCCTGAACAGGTAGGGGGAATAAAGGGC |
| | TAAGATAGGAAGGTGAGGTTCTTTGTTGATGTTGAAAATCTAAAGAAGTTGGTAGC |
| | TTTTCTAGAGATTTCTGACCTTGAAAGATTAAGAAAAAGCCAGGTGGCATATGCTT |
| | AACACTATATAACTTGGGAACCTTAGGCAGGAGGGTGATAAGTTCAAGGTCAGCCA |
| | GGGCTATGCTGGTAAGACTGTCTCAAAATCCAAAGACGAAAATAAACATAGAGACA |
| | GCAGGAGGCTGGAGATGAGGCTCGGACAGTGAGGTGCATTTTGTACAAGCACGAGG |
| | AATCTATATTTGATCGTAGACCCCACATGAAAAAGCTAGGCCTGGTAGAGCATGCT |
| | TGTAGACTCAAGAGATGGAGAGGTAAAGGCACAACAGATCCCCGGGGCTTGCGTGC |
| | AGTCAGCTTAGCCTAGGTGCTGAGTTCCAAGTCCACAAGAGTCCCTGTCTCAAAGT |
| | AAGATGGACTGAGTATCTGGCGAATGTCCATGGGGGTTGTCCTCTGCTCTCAGAAG |
| | AGACATGCACATGAACCTGCACACACACACACACACACACACACACACACACACAC |
| | ACACACACACACACACACATGAAATGAAGGTTCTCTCTGTGCCTGCTACCTCTCTA |
| | TAACATGTATCTCTACAGGACTCTCCTCTGCCTCTGTTAAGACATGAGTGGGAGCA |
| | TGGCAGAGCAGTCCAGTAATTAATTCCAGCACTCAGAAGGCTGGAGCAGAAGCGTG |
| | GAGAGTTCAGGAGCACTGTGCCCAACACTGCCAGACTCTTCTTACAGAAGAAAAAG |
| | GTTACCCGCAAGCAGCCTGCTGTCTGTAAAAGGAAACCCTGCGAAAGGCAAACTTT |
| | GACTGTTGTGTGCTCAAGGGGAACTGACTCAGACAACTTCTCCATTCCTGGAGGAA |
| | ACTGGAGCTGTTTCTGACAGAAGAACAACCGGTGACTGGGACATACGAAGGCAGAG |
| | CTCTTGCAGCAATCTATATAGTCAGCAAAATATTCTTTGGGAGGACAGTCGTCACC |
| | AAATTGATTTCCAAGCCGGTGGACCTCAGTTTCATCTGGCTTACAGCTGCCTGCCC |
| | AGTGCCCTTGATCTGTGCTGGCTCCCATCTATAACAGAATCAAATTAAATAGACCC |
| | CGAGTGAAAATATTAAGTGAGCAGAAAGGTAGCTTTGTTCAAAGATTTTTTTGCAT |
| | TGGGGAGCAACTGTGTACATCAGAGGACATCTGTTAGTGAGGACACCAAAACCTGT |
| | GGTACCGTTTTTTCATGTATGAATTTTGTTGTTTAGGTTGCTTCTAGCTAGCTGTG |
| | GAGGTCCTGGCTTTCTTAGGTGGGTATGGAAGGGAGACCATCTAACAAAATCCATT |
| | AGAGATAACAGCTCTCATGCAGAAGGGAAAACTAATCTCAAATGTTTTAAAGTAAT |
| | AAAACTGTACTGGCAAAGTACTTTGAGCATATTTAAA (SEQ ID NO: 83) |
| | >NP_599011.2 hepatitis A virus cellular receptor 2 homolog |
| | precursor [Mus musculus] |
| | MFSGLTLNCVLLLLQLLLARSLENAYVFEVGKNAYLPCSYTLSTPGALVPMCWGKG |
| | FCPWSQCTNELLRTDERNVTYQKSSRYQLKGDLNKGDVSLIIKNVTLDDHGTYCCR |
| | IQFPGLMNDKKLELKLDIKAAKVTPAQTAHGDSTTASPRTLTTERNGSETQTLVTL |
| | HNNNGTKISTWADEIKDSGETIRTAIHIGVGVSAGLTLALIIGVLILKWYSCKKKK |
| | LSSLSLITLANLPPGGLANAGAVRIRSEENIYTIEENVYEVENSNEYYCYVNSQQP |
| | S (SEQ ID NO: 84) |
| Human Tim-4 | >NM_138379.3 Homo sapiens T cell immunoglobulin and mucin |
| (TIMD4) | domain containing 4 (TIMD4), transcript variant 1, mRNA |
| | AGACTCCTGGGTCCGGTCAACCGTCAAAATGTCCAAAGAACCTCTCATTCTCTGGC |
| | TGATGATTGAGTTTTGGTGGCTTTACCTGACACCAGTCACTTCAGAGACTGTTGTG |
| | ACGGAGGTTTTGGGTCACCGGGTGACTTTGCCCTGTCTGTACTCATCCTGGTCTCA |
| | CAACAGCAACAGCATGTGCTGGGGGAAAGACCAGTGCCCCTACTCCGGTTGCAAGG |
| | AGGCGCTCATCCGCACTGATGGAATGAGGGTGACCTCAAGAAAGTCAGCAAAATAT |
| | AGACTTCAGGGGACTATCCCGAGAGGTGATGTCTCCTTGACCATCTTAAACCCCAG |
| | TGAAAGTGACAGCGGTGTGTACTGCTGCCGCATAGAAGTGCCTGGCTGGTTCAACG |
| | ATGTAAAGATAAACGTGCGCCTGAATCTACAGAGAGCCTCAACAACCACGCACAGA |
| | ACAGCAACCACCACCACACGCAGAACAACAACAACAAGCCCCACCACCACCCGACA |
| | AATGACAACAACCCCAGCTGCACTTCCAACAACAGTCGTGACCACACCCGATCTCA |
| | CAACCGGAACACCACTCCAGATGACAACCATTGCCGTCTTCACAACAGCAAACACG |
| | TGCCTTTCACTAACCCCAAGCACCCTTCCGGAGGAAGCCACAGGTCTTCTGACTCC |
| | CGAGCCTTCTAAGGAAGGGCCCATCCTCACTGCAGAATCAGAAACTGTCCTCCCCA |
| | GTGATTCCTGGAGTAGTGTTGAGTCTACTTCTGCTGACACTGTCCTGCTGACATCC |
| | AAAGAGTCCAAAGTTTGGGATCTCCCATCAACATCCCACGTGTCAATGTGGAAAAC |
| | GAGTGATTCTGTGTCTTCTCCTCAGCCTGGAGCATCTGATACAGCAGTTCCTGAGC |
| | AGAACAAAACAACAAAAACAGGACAGATGGATGGAATACCCATGTCAATGAAGAAT |
| | GAAATGCCCATCTCCCAACTACTGATGATCATCGCCCCCTCCTTGGGATTTGTGCT |
| | CTTCGCATTGTTTGTGGCGTTTCTCCTGAGAGGGAAACTCATGGAAACCTATTGTT |
| | CGCAGAAACACACAAGGCTAGACTACATTGGAGATAGTAAAAATGTCCTCAATGAC |
| | GTGCAGCATGGAAGGGAAGACGAAGACGGCCTTTTTACCCTCTAACAACGCAGTAG |
| | CATGTTAGATTGAGGATGGGGGCATGACACTCCAGTGTCAAAATAAGTCTTAGTAG |
| | ATTTCCTTGTTTCATAAAAAAGACTCACTTATTCCATGGATGTCATTGATCCAGGC |
| | TTGCTTTAGTTTCATGAATGAAGGGTACTTTAGAGACCACAA (SEQ ID NO: |
| | 85) |
| | >NP_612388.2 T-cell immunoglobulin and mucin domain- |
| | containing protein 4 isoform 1 precursor [Homo sapiens] |
| | MSKEPLILWLMIEFWWLYLTPVTSETVVTEVLGHRVTLPCLYSSWSHNSNSMCWGK |
| | DQCPYSGCKEALIRTDGMRVTSRKSAKYRLQGTIPRGDVSLTILNPSESDSGVYCC |
| | RIEVPGWFNDVKINVRLNLQRASTTTHRTATTTTRRTTTTSPTTTRQMTTTPAALP |
| | TTVVTTPDLTTGTPLQMTTIAVFTTANTCLSLTPSTLPEEATGLLTPEPSKEGPIL |
| | TAESETVLPSDSWSSVESTSADTVLLTSKESKVWDLPSTSHVSMWKTSDSVSSPQP |
| | GASDTAVPEQNKTTKTGQMDGIPMSMKNEMPISQLLMIIAPSLGFVLFALFVAFLL |
| | RGKLMETYCSQKHTRLDYIGDSKNVLNDVQHGREDEDGLFTL (SEQ ID NO: |
| | 86) |
| Mouse Tim-4 | >NM_178759.4 Mus musculus T cell immunoglobulin and mucin |
| (TIMD4) | domain containing 4 (Timd4), mRNA |
| | AGATCCTATCAAAATGTCCAAGGGGCTTCTCCTCCTCTGGCTGGTGACGGAGCTCT |
| | GGTGGCTTTATCTGACACCAGCTGCCTCAGAGGATACAATAATAGGGTTTTTGGGC |
| | CAGCCGGTGACTTTGCCTTGTCATTACCTCTCGTGGTCCCAGAGCCGCAACAGTAT |
| | GTGCTGGGGCAAAGGTTCATGTCCCAATTCCAAGTGCAATGCAGAGCTTCTCCGTA |
| | CAGATGGAACAAGAATCATCTCCAGGAAGTCAACAAAATATACACTTTTGGGGAAG |
| | GTCCAGTTTGGTGAAGTGTCCTTGACCATCTCAAACACCAATCGAGGTGACAGTGG |
| | GGTGTACTGCTGCCGTATAGAGGTGCCTGGCTGGTTCAATGATGTCAAGAAGAATG |
| | TGCGCTTGGAGCTGAGGAGAGCCACAACAACCAAAAAACCAACAACAACCACCCGG |
| | CCAACCACCACCCCTTATGTGACCACCACCACCCCAGAGCTGCTTCCAACAACAGT |
| | CATGACCACATCTGTTCTCCCAACCACCACACCACCCCAGACACTAGCCACCACTG |
| | CCTTCAGTACAGCAGTGACCACGTGCCCCTCAACAACACCTGGCTCCTTCTCACAA |
| | GAAACCACAAAAGGGTCCGCCTTCACTACAGAATCAGAAACTCTGCCTGCATCCAA |
| | TCACTCTCAAAGAAGCATGATGACCATATCTACAGACATAGCCGTACTCAGGCCCA |
| | CAGGCTCTAACCCTGGGATTCTCCCATCCACTTCACAGCTGACGACACAGAAAACA |
| | ACATTAACAACAAGTGAGTCTTTGCAGAAGACAACTAAATCACATCAGATCAACAG |
| | CAGACAGACCATCTTGATCATTGCCTGCTGTGTGGGATTTGTGCTAATGGTGTTAT |
| | TGTTTCTGGCGTTTCTCCTTCGAGGGAAAGTCACAGGAGCCAACTGTTTGCAGAGA |
| | CACAAGAGGCCAGACAACACTGAAGATAGTGACAGCGTCCTCAATGACATGTCACA |
| | CGGGAGGGATGATGAAGACGGGATCTTCACTCTCTGACTCACCATCTTTATTTAGG |
| | ATTAAGGATAGGGAATGGCACTTGAATTGTCAAAATAAGTTTGGGGACATTGTAAT |
| | TTCCGTTTAAAGTCTCACTCTGTTTACTGATGCTGTGGGTCCTGTCTGGTTGTATC |
| | TTCCCACATGAAGGTGCTTTAGAGACACATTTTCCCTGCCTCGTGCCTTAGTCCTC |
| | TTTGTTGTTTTGTGGCTAGGTGACTTTTCACACTGGGCTTGAACACTGTCAGTGAT |
| | GGTGAAATCCTTGCCACAGCTTTGGGAGTCTCTTGCAGTCTCCCAGCAGTAGAGGG |
| | AGTTAGATATCCAGAGGGGAAAAAAAAAAATCTCTCTTTTCAGACAGTATCTGCTT |
| | TATTGGTGGTAGCTGAACTTCATTTATACAGAGCTCCTTTAACCTGTCTGTCTTCT |
| | TCTTGGTATCTAAGCTGCCTTTTGTTTTTGTTTTTGTTTTTGTTTTTATGATATTA |
| | ACTTCTTTTCACATTCAAGTTTCTTTAAAGTTGACTATAGTGCCTTCTGAACTCTT |
| | GCAGAGAGTTTGGATTTTGGAAGCTGCCAGGTACCCATCACAGCAGGGGTGCCAGT |
| | GACAAGGATGGTGTACAAATGAAACACTGAAGCTATCCAAATAAATTCCTCTAAGT |
| | GTAATTCATTTTACTGCAGCACAGGAAGAACAAATTTGTCTTACAACTTTAATAAT |
| | TAGTACCATTATGAACCCTAGGAGAGAAATAAGAGCAAATACCTGTTGAATAAATG |
| | AATGTAAGAAAATGTGTGTCTGAGCAAGAATACTCTGTCTGGCTACTATGGGAAGC |
| | TAGCTAGATCTGAAAGACATTCTCAGACTATCCTCATGTTCAAGGCATTAAAGGAA |
| | TAAGCCTCCAGCCCCTAACCTTAGGAGAATTCTGCAGTCAAGTGAGGAGTTTTTAA |
| | AACAGGAATCTCTAGGTTCCAGTCCTCTAGCTATTCTTTTATGCTTAGTCCAGGTA |
| | ATGAGTTGAACATCCAAGTATTTTTTAAGGACCCAAAGAAATGCAACCAGAGCTAT |
| | TACCAGAATTTTGGAGTGGTCCTCCTAGAGTTGCCGCATGTTGCTGGGAAAATTGG |
| | GGTCTTAGAGTTCTTAGTCTACTTAATAAAAGAATTTTAAAAAATGG (SEQ ID |
| | NO: 87) |
| | >NP_848874.3 T-cell immunoglobulin and mucin domain- |
| | containing protein 4 precursor [Mus musculus] |
| | MSKGLLLLWLVTELWWLYLTPAASEDTIIGFLGQPVTLPCHYLSWSQSRNS |
| | MCWGKGSCPNSKCNAELLRTDGTRIISRKSTKYTLLGKVQFGEVSLTISNT |
| | NRGDSGVYCCRIEVPGWFNDVKKNVRLELRRATTTKKPTTTTRPTTTPYVT |
| | TTTPELLPTTVMTTSVLPTTTPPQTLATTAFSTAVTTCPSTTPGSFSQETT |
| | KGSAFTTESETLPASNHSQRSMMTISTDIAVLRPTGSNPGILPSTSQLTTQ |
| | KTTLTTSESLQKTTKSHQINSRQTILIIACCVGFVLMVLLFLAFLLRGKVT |
| | GANCLQRHKRPDNTEDSDSVLNDMSHGRDDEDGIFTL (SEQ ID NO: 88) |
| Human | >NM_001712.5 Homo sapiens CEA cell adhesion molecule |
| CEACAM1 | 1 (CEACAM1), transcript variant 1, mRNA |
| | AGCACAGAGAGTGGAAAACAGCAGAGGTGACAGAGCAGCCGTGCTCGAAGC |
| | GTTCCTGGAGCCCAAGCTCTCCTCCACAGGTGAAGACAGGGCCAGCAGGAG |
| | ACACCATGGGGCACCTCTCAGCCCCACTTCACAGAGTGCGTGTACCCTGGC |
| | AGGGGCTTCTGCTCACAGCCTCACTTCTAACCTTCTGGAACCCGCCCACCA |
| | CTGCCCAGCTCACTACTGAATCCATGCCATTCAATGTTGCAGAGGGGAAGG |
| | AGGTTCTTCTCCTTGTCCACAATCTGCCCCAGCAACTTTTTGGCTACAGCT |
| | GGTACAAAGGGGAAAGAGTGGATGGCAACCGTCAAATTGTAGGATATGCAA |
| | TAGGAACTCAACAAGCTACCCCAGGGCCCGCAAACAGCGGTCGAGAGACAA |
| | TATACCCCAATGCATCCCTGCTGATCCAGAACGTCACCCAGAATGACACAG |
| | GATTCTACACCCTACAAGTCATAAAGTCAGATCTTGTGAATGAAGAAGCAA |
| | CTGGACAGTTCCATGTATACCCGGAGCTGCCCAAGCCCTCCATCTCCAGCA |
| | ACAACTCCAACCCTGTGGAGGACAAGGATGCTGTGGCCTTCACCTGTGAAC |
| | CTGAGACTCAGGACACAACCTACCTGTGGTGGATAAACAATCAGAGCCTCC |
| | CGGTCAGTCCCAGGCTGCAGCTGTCCAATGGCAACAGGACCCTCACTCTAC |
| | TCAGTGTCACAAGGAATGACACAGGACCCTATGAGTGTGAAATACAGAACC |
| | CAGTGAGTGCGAACCGCAGTGACCCAGTCACCTTGAATGTCACCTATGGCC |
| | CGGACACCCCCACCATTTCCCCTTCAGACACCTATTACCGTCCAGGGGCAA |
| | ACCTCAGCCTCTCCTGCTATGCAGCCTCTAACCCACCTGCACAGTACTCCT |
| | GGCTTATCAATGGAACATTCCAGCAAAGCACACAAGAGCTCTTTATCCCTA |
| | ACATCACTGTGAATAATAGTGGATCCTATACCTGCCACGCCAATAACTCAG |
| | TCACTGGCTGCAACAGGACCACAGTCAAGACGATCATAGTCACTGAGCTAA |
| | GTCCAGTAGTAGCAAAGCCCCAAATCAAAGCCAGCAAGACCACAGTCACAG |
| | GAGATAAGGACTCTGTGAACCTGACCTGCTCCACAAATGACACTGGAATCT |
| | CCATCCGTTGGTTCTTCAAAAACCAGAGTCTCCCGTCCTCGGAGAGGATGA |
| | AGCTGTCCCAGGGCAACACCACCCTCAGCATAAACCCTGTCAAGAGGGAGG |
| | ATGCTGGGACGTATTGGTGTGAGGTCTTCAACCCAATCAGTAAGAACCAAA |
| | GCGACCCCATCATGCTGAACGTAAACTATAATGCTCTACCACAAGAAAATG |
| | GCCTCTCACCTGGGGCCATTGCTGGCATTGTGATTGGAGTAGTGGCCCTGG |
| | TTGCTCTGATAGCAGTAGCCCTGGCATGTTTTCTGCATTTCGGGAAGACCG |
| | GCAGGGCAAGCGACCAGCGTGATCTCACAGAGCACAAACCCTCAGTCTCCA |
| | ACCACACTCAGGACCACTCCAATGACCCACCTAACAAGATGAATGAAGTTA |
| | CTTATTCTACCCTGAACTTTGAAGCCCAGCAACCCACACAACCAACTTCAG |
| | CCTCCCCATCCCTAACAGCCACAGAAATAATTTATTCAGAAGTAAAAAAGC |
| | AGTAATGAAACCTGTCCTGCTCACTGCAGTGCTGATGTATTTCAAGTCTCT |
| | CACCCTCATCACTAGGAGATTCCTTTCCCCTGTAGGGGTAGAGGGGTGGGG |
| | ACAGAAACAACTTTCTCCTACTCTTCCTTCCTAATAGGCATCTCCAGGCTG |
| | CCTGGTCACTGCCCCTCTCTCAGTGTCAATAGATGAAAGTACATTGGGAGT |
| | CTGTAGGAAACCCAACCTTCTTGTCATTGAAATTTGGCAAAGCTGACTTTG |
| | GGAAAGAGGGACCAGAACTTCCCCTCCCTTCCCCTTTTCCCAACCTGGACT |
| | TGTTTTAAACTTGCCTGTTCAGAGCACTCATTCCTTCCCACCCCCAGTCCT |
| | GTCCTATCACTCTAATTCGGATTTGCCATAGCCTTGAGGTTATGTCCTTTT |
| | CCATTAAGTACATGTGCCAGGAAACAAGAGAGAGAGAAAGTAAAGGCAGTA |
| | ATGCCTTCTCCTATTTCTCCAAAGCCTTGTGTGAACTCACCAAACACAAGA |
| | AAATCAAATATATAACCAATAGTGAAATGCCACACCTTTGTCCACTGTCAG |
| | GGTTGTCTACCTGTAGGATCAGGGTCTAAGCACCTTGGTGCTTAGCTAGAA |
| | TACCACCTAATCCTTCTGGCAAGCCTGTCTTCAGAGAACCCACTAGAAGCA |
| | ACTAGGAAAATCACTTGCCAAAATCCAAGGCAATTCCTGATGGAAAATGCA |
| | AAAGCACATATATGTTTTAATATCTTTATGGGCTCTGTTCAAGGCAGTGCT |
| | GAGAGGGAGGGGTTATAGCTTCAGGAGGGAACCAGCTTCTGATAAACACAA |
| | TCTGCTAGGAACTTGGGAAAGGAATCAGAGAGCTGCCCTTCAGCGATTATT |
| | TAAATTATTGTTAAAGAATACACAATTTGGGGTATTGGGATTTTTCTCCTT |
| | TTCTCTGAGACATTCCACCATTTTAATTTTTGTAACTGCTTATTTATGTGA |
| | AAAGGGTTATTTTTACTTAGCTTAGCTATGTCAGCCAATCCGATTGCCTTA |
| | GGTGAAAGAAACCACCGAAATCCCTCAGGTCCCTTGGTCAGGAGCCTCTCA |
| | AGATTTTTTTTGTCAGAGGCTCCAAATAGAAAATAAGAAAAGGTTTTCTTC |
| | ATTCATGGCTAGAGCTAGATTTAACTCAGTTTCTAGGCACCTCAGACCAAT |
| | CATCAACTACCATTCTATTCCATGTTTGCACCTGTGCATTTTCTGTTTGCC |
| | CCCATTCACTTTGTCAGGAAACCTTGGCCTCTGCTAAGGTGTATTTGGTCC |
| | TTGAGAAGTGGGAGCACCCTACAGGGACACTATCACTCATGCTGGTGGCAT |
| | TGTTTACAGCTAGAAAGCTGCACTGGTGCTAATGCCCCTTGGGGAAATGGG |
| | GCTGTGAGGAGGAGGATTATAACTTAGGCCTAGCCTCTTTTAACAGCCTCT |
| | GAAATTTATCTTTTCTTCTATGGGGTCTATAAATGTATCTTATAATAAAAA |
| | GGAAGGACAGGAGGAAGACAGGCAAATGTACTTCTCACCCAGTCTTCTACA |
| | CAGATGGAATCTCTTTGGGGCTAAGAGAAAGGTTTTATTCTATATTGCTTA |
| | CCTGATCTCATGTTAGGCCTAAGAGGCTTTCTCCAGGAGGATTAGCTTGGA |
| | GTTCTCTATACTCAGGTACCTCTTTCAGGGTTTTCTAACCCTGACACGGAC |
| | TGTGCATACTTTCCCTCATCCATGCTGTGCTGTGTTATTTAATTTTTCCTG |
| | GCTAAGATCATGTCTGAATTATGTATGAAAATTATTCTATGTTTTTATAAT |
| | AAAAATAATATATCAGACATCGA (SEQ ID NO: 89) |
| | >NP_001703.2 carcinoembryonic antigen-related cell |
| | adhesion molecule 1 isoform 1 precursor [Homo |
| | sapiens] |
| | MGHLSAPLHRVRVPWQGLLLTASLLTFWNPPTTAQLTTESMPFNVAEGKEV |
| | LLLVHNLPQQLFGYSWYKGERVDGNRQIVGYAIGTQQATPGPANSGRETIY |
| | PNASLLIQNVTQNDTGFYTLQVIKSDLVNEEATGQFHVYPELPKPSISSNN |
| | SNPVEDKDAVAFTCEPETQDTTYLWWINNQSLPVSPRLQLSNGNRTLTLLS |
| | VTRNDTGPYECEIQNPVSANRSDPVTLNVTYGPDTPTISPSDTYYRPGANL |
| | SLSCYAASNPPAQYSWLINGTFQQSTQELFIPNITVNNSGSYTCHANNSVT |
| | GCNRTTVKTIIVTELSPVVAKPQIKASKTTVTGDKDSVNLTCSTNDTGISI |
| | RWFFKNQSLPSSERMKLSQGNTTLSINPVKREDAGTYWCEVFNPISKNQSD |
| | PIMLNVNYNALPQENGLSPGAIAGIVIGVVALVALIAVALACFLHFGKTGR |
| | ASDQRDLTEHKPSVSNHTQDHSNDPPNKMNEVTYSTLNFEAQQPTQPTSAS |
| | PSLTATEIIYSEVKKQ (SEQ ID NO: 90) |
| Mouse | >NM_001039185.1 Mus musculus carcinoembryonic |
| CEACAM1 | antigen-related cell adhesion molecule 1 (Ceacam1), |
| | transcript variant 1, mRNA |
| | AAAGCTCCTTTAAGAAAAGCAGGGCAGATATCAGGGCAGCCTGGCTTAGCA |
| | GTAGTGTTGGAGAAGAAGCTAGCAGGCAGGCAGCAGAGACATGGAGCTGGC |
| | CTCAGCACATCTCCACAAAGGGCAGGTTCCCTGGGGAGGACTACTGCTCAC |
| | AGCCTCACTTTTAGCCTCCTGGAGCCCTGCCACCACTGCTGAAGTCACCAT |
| | TGAGGCTGTGCCGCCCCAGGTTGCTGAAGACAACAATGTTCTTCTACTTGT |
| | TCACAATCTGCCCCTGGCGCTTGGAGCCTTTGCCTGGTACAAGGGAAACAC |
| | TACGGCTATAGACAAAGAAATTGCACGATTTGTACCAAATAGTAATATGAA |
| | TTTCACGGGGCAAGCATACAGCGGCAGAGAGATAATATACAGCAATGGATC |
| | CCTGCTCTTCCAAATGATCACCATGAAGGATATGGGAGTCTACACACTAGA |
| | TATGACAGATGAAAACTATCGTCGTACTCAGGCGACTGTGCGATTTCATGT |
| | ACACCCCATATTATTAAAGCCCAACATCACAAGCAACAACTCCAATCCCGT |
| | GGAGGGTGACGACTCCGTATCATTAACCTGTGACTCTTACACTGACCCTGA |
| | TAATATAAACTACCTGTGGAGCAGAAATGGTGAAAGCCTTTCAGAAGGTGA |
| | CAGGCTGAAGCTGTCTGAGGGCAACAGGACTCTCACTTTACTCAATGTCAC |
| | GAGGAATGACACAGGACCCTATGTGTGTGAAACCCGGAATCCAGTGAGTGT |
| | CAACCGAAGTGACCCATTCAGCCTGAACATTATCTATGGTCCGGACACCCC |
| | GATTATATCCCCCTCAGATATTTATTTGCATCCAGGGTCAAACCTCAACCT |
| | CTCCTGCCATGCAGCCTCTAACCCACCTGCACAGTACTTTTGGCTTATCAA |
| | TGAGAAGCCCCATGCATCCTCCCAAGAGCTCTTTATCCCCAACATCACTAC |
| | TAATAATAGCGGAACCTATACCTGCTTCGTCAATAACTCTGTCACTGGCCT |
| | CAGTAGGACCACAGTCAAGAACATTACAGTCCTTGAGCCAGTGACTCAGCC |
| | CTTCCTCCAAGTCACCAACACCACAGTCAAAGAACTAGACTCTGTGACCCT |
| | GACCTGCTTGTCGAATGACATTGGAGCCAACATCCAGTGGCTCTTCAATAG |
| | CCAGAGTCTTCAGCTCACAGAGAGAATGACACTCTCCCAGAACAACAGCAT |
| | CCTCAGAATAGACCCTATTAAGAGGGAAGATGCCGGCGAGTATCAGTGTGA |
| | AATCTCGAATCCAGTCAGCGTCAGGAGGAGCAACTCAATCAAGCTGGACAT |
| | AATATTTGACCCAACACAAGGAGGCCTCTCAGATGGCGCCATTGCTGGCAT |
| | CGTGATTGGAGTTGTGGCTGGGGTGGCTCTAATAGCAGGGCTGGCATATTT |
| | CCTCTATTCCAGGAAGTCTGGCGGGGGAAGTGACCAGCGAGATCTCACAGA |
| | GCACAAACCCTCAGCCTCCAACCACAATCTGGCTCCTTCTGACAACTCTCC |
| | TAACAAGGTGGATGACGTCGCATACACTGTCCTGAACTTCAATTCCCAGCA |
| | ACCCAACCGGCCAACTTCAGCCCCTTCTTCTCCAAGAGCCACAGAAACAGT |
| | TTATTCAGAAGTAAAAAAGAAGTGAGCATAATCTGTCCGTCTGTCCTGCTG |
| | GCTGCACCAGTGATGCATTCCCGGATTCTGTTCCTCACTGGAGGGTCTCAG |
| | CACACACACACACGTACACATGCGCGCGCGCACACACACACACACACACAC |
| | ACACACACACTTACACACACACTCATGCATTCACTCTATTGACTCCTTCAG |
| | TGTCTATAGAAGAAAAGGTGGATCCTGGAGCCTACAGAAAACTCAACCCTT |
| | CTAGGCTTTCAAATTTGGCTGAGAGTGAGGTATCAAAATTTCTCACCCTTT |
| | CACTTTCCTGACCCAGATTGTTGAAAATTGACCTATTCAGAGCACCTTCAT |
| | TCCCCTCCCAACTCCAAGTCCTGCCCTATCAGAGTCTGACTTGAATTTCCA |
| | TAAACCTTGGAGGTCACCTAAGTGCTTACGCCAAACAAAACAAAACAAAAC |
| | AAAACAAAACAAAACAAAACAAAACAAAACAAACCAGAAGCAGGAAATGGC |
| | CAGTCCCATATCTTTAAAGGCTGATTGGAAGCCACCATACATGAGAAGATC |
| | AAACCTCCATGGGCAATCTACACACCCGACAACTGTCATGCTTACCCATCT |
| | GGGACATTCGAGTCTCTGAACCTTGTGCCCTCACGCCTGAGCCCTTCTCTG |
| | AGCCTTTCTCCAGAAAATCCACTCACAGCAACTAGAGAGGCTCTTTGTCAG |
| | CAACTCCAAGCAAACTGCTAGGCAGGATTCAGAAGAAAAGACAGCATCTCT |
| | AACATCCACCAGGAAGGTGCCCAGAAAAGCAGAGCTGGTGACTTTGGACTG |
| | ACAGACATCTGGAGTGTGAAAAAGCAGCACAGAGCTAACCTTCGGAGAGTG |
| | TTGAAATTATTTGAAAAGAAGCCATATTTGGAGGTATTGGAGTTTTCCTCT |
| | TTCTGAGACAATCCACTATTTGAAAATTGTAGCTACTGAATTGCCTCTCAG |
| | TATGCGAGCTGATCACTTTGCCTTAGGGCCACTAGATTTCTGTCTCCCTTA |
| | GCCCCTCAAGCCCTTTTGATCATGAGTTCCAAACCAAAAATAAATAAATGA |
| | ACAGTGAGGCAGTCCCTTGCAGTACCACTGTCATGGGTCAGGCTAAGCCTC |
| | CTGCTTTTCTGAATTAGTCAAGAAAAGCCTTGGTTTCCCTTTTTCCATCTC |
| | TTTATCTTGTCTTTCAGATACTGGCCAGAGCCTGGACACTCTTCCTCTGAG |
| | ATCTCCAGCTTCTCTGCCTTCTTGTGTTTCTTTTAAACTCTAACAAAAACT |
| | GTTCTCACCTTCAAAAAATAAAATAATAACAAGCTTTCCACATCCCCACCA |
| | AAGAGGGACCCAGCTAGGTTTCTGGAAACCCAGCACCAGCCTCCAGCTGCC |
| | CTTCTGCAGTGTTTCTGCCTCTGTTTCCCTTTCGTTTTGACTTTTTTCCTT |
| | CTTTTGAGACAGAGTTCCAGCATGGAGCCTGTGCAGGTTTCAATCCCACAG |
| | TAACACCTTCTGCAGCACCCCACCTGCTCAGACTGCAGCCCTGGCCACCAG |
| | GCCTGGCTACCTGGACATTCTGTCTGCCCTGCACTCTCAGGAAACCTTGGC |
| | CTCTGCTACTGTCTGTTTGGCTCATTCAAAGTGTGTCCTTAAAGGAATGCA |
| | GTCACCCATGCCAGAGGCAGTGTTTACAGCCTGGAATGCTCTGCACTTCCA |
| | GTGGACCAGTGCTCCACCGGAAGTGGGCTGTTAGCAGGGTCCTCTCACCTG |
| | GCCCTGGCCTTTCTGTAGCCTTGAATCCTGCCTTCCCCACCAGGGCACCAG |
| | GGATGAGTGCAGCAGCAGGAGGAGAGGCAAACAGTCACCTCAGGAACCTTC |
| | TGAGCTAAGGCACACCCTCTGTGCCTGTCAAGCAAAGGTTGTATTGGATAT |
| | CAAGTGTTTGGTCTCACGCCAAGCCAACAGGCTTTGGAGAGAATTAATTAG |
| | TTCTCCTACTCAGGGATTTCTTTCAGTCCTAACACAGCCTGTGTATATTTT |
| | GCTTCACCCACGCAATGCTGGATTATTTAATTTTGCCCGGCTTAAGACAAA |
| | TCTGAGTTACTTGTAAATTTGCTCTATGTTCATAATAAAAATGTATTATAT |
| | ATCACTGATAGCA (SEQ ID NO: 91) |
| | >NP_001034274.1 carcinoembryonic antigen-related |
| | cell adhesion molecule 1 isoform 1 precursor [Mus |
| | musculus] |
| | MELASAHLHKGQVPWGGLLLTASLLASWSPATTAEVTIEAVPPQVAEDNNV |
| | LLLVHNLPLALGAFAWYKGNTTAIDKEIARFVPNSNMNFTGQAYSGREIIY |
| | SNGSLLFQMITMKDMGVYTLDMTDENYRRTQATVRFHVHPILLKPNITSNN |
| | SNPVEGDDSVSLTCDSYTDPDNINYLWSRNGESLSEGDRLKLSEGNRTLTL |
| | LNVTRNDTGPYVCETRNPVSVNRSDPFSLNIIYGPDTPIISPSDIYLHPGS |
| | NLNLSCHAASNPPAQYFWLINEKPHASSQELFIPNITTNNSGTYTCFVNNS |
| | VTGLSRTTVKNITVLEPVTQPFLQVTNTTVKELDSVTLTCLSNDIGANIQW |
| | LFNSQSLQLTERMTLSQNNSILRIDPIKREDAGEYQCEISNPVSVRRSNSI |
| | KLDIIFDPTQGGLSDGAIAGIVIGVVAGVALIAGLAYFLYSRKSGGGSDQR |
| | DLTEHKPSASNHNLAPSDNSPNKVDDVAYTVLNFNSQQPNRPTSAPSSPRA |
| | TETVYSEVKKK (SEQ ID NO: 92) |
| Human | >NM_007048.6 Homo sapiens butyrophilin subfamily 3 |
| BTN3A1 | member A1 (BTN3A1), transcript variant 1, mRNA |
| | ATTCCTCACGATGACCCGACAGTCTCTGCTTTCTTTTTCCTTTCTTCCAGA |
| | AGGAGATTTAACCATAGTAGAAAGAATGGAGAACTATTAACTGCCTTTCTT |
| | CTGTGGGCTGTGATTTTCAGAGGGGAATGCTAAGAGGTGATTTTCAATGTT |
| | GGGACTCAAAGGTGAAGACACTGAAGGACAGAATTTTTGGCAGAGGAAAGA |
| | TCTTCTTCGGTCACCATACTTGAGTTAGCTCTAGGGAAGTGGAGGTTTCCA |
| | TTTGGAATTCTATAGCTTCTTCCAGGTCATAGTGTCTGCCCCCCACCTTCC |
| | AGTATCTCCTGATATGCAGCATGAATGAAAATGGCAAGTTTCCTGGCCTTC |
| | CTTCTGCTCAACTTTCGTGTCTGCCTCCTTTTGCTTCAGCTGCTCATGCCT |
| | CACTCAGCTCAGTTTTCTGTGCTTGGACCCTCTGGGCCCATCCTGGCCATG |
| | GTGGGTGAAGACGCTGATCTGCCCTGTCACCTGTTCCCGACCATGAGTGCA |
| | GAGACCATGGAGCTGAAGTGGGTGAGTTCCAGCCTAAGGCAGGTGGTGAAC |
| | GTGTATGCAGATGGAAAGGAAGTGGAAGACAGGCAGAGTGCACCGTATCGA |
| | GGGAGAACTTCGATTCTGCGGGATGGCATCACTGCAGGGAAGGCTGCTCTC |
| | CGAATACACAACGTCACAGCCTCTGACAGTGGAAAGTACTTGTGTTATTTC |
| | CAAGATGGTGACTTCTATGAAAAAGCCCTGGTGGAGCTGAAGGTTGCAGCA |
| | CTGGGTTCTGATCTTCACGTTGATGTGAAGGGTTACAAGGATGGAGGGATC |
| | CATCTGGAGTGCAGGTCCACTGGCTGGTACCCCCAACCCCAAATACAGTGG |
| | AGCAACAACAAGGGAGAGAACATCCCGACTGTGGAAGCACCTGTGGTTGCA |
| | GACGGAGTGGGCCTGTATGCAGTAGCAGCATCTGTGATCATGAGAGGCAGC |
| | TCTGGGGAGGGTGTATCCTGTACCATCAGAAGTTCCCTCCTCGGCCTGGAA |
| | AAGACAGCCAGCATTTCCATCGCAGACCCCTTCTTCAGGAGCGCCCAGAGG |
| | TGGATCGCCGCCCTGGCAGGGACCCTGCCTGTCTTGCTGCTGCTTCTTGGG |
| | GGAGCCGGTTACTTCCTGTGGCAACAGCAGGAGGAAAAAAAGACTCAGTTC |
| | AGAAAGAAAAAGAGAGAGCAAGAGTTGAGAGAAATGGCATGGAGCACAATG |
| | AAGCAAGAACAAAGCACAAGAGTGAAGCTCCTGGAGGAACTCAGATGGAGA |
| | AGTATCCAGTATGCATCTCGGGGAGAGAGACATTCAGCCTATAATGAATGG |
| | AAAAAGGCCCTCTTCAAGCCTGCGGATGTGATTCTGGATCCAAAAACAGCA |
| | AACCCCATCCTCCTTGTTTCTGAGGACCAGAGGAGTGTGCAGCGTGCCAAG |
| | GAGCCCCAGGATCTGCCAGACAACCCTGAGAGATTTAATTGGCATTATTGT |
| | GTTCTCGGCTGTGAGAGCTTCATATCAGGGAGACATTACTGGGAGGTGGAG |
| | GTAGGGGACAGGAAAGAGTGGCATATAGGGGTGTGCAGTAAGAATGTGCAG |
| | AGAAAAGGCTGGGTCAAAATGACACCTGAGAATGGATTCTGGACTATGGGG |
| | CTGACTGATGGGAATAAGTATCGGACTCTAACTGAGCCCAGAACCAACCTG |
| | AAACTTCCTAAGCCCCCTAAGAAAGTGGGGGTCTTCCTGGACTATGAGACT |
| | GGAGATATCTCATTCTACAATGCTGTGGATGGATCGCATATTCATACTTTC |
| | CTGGACGTCTCCTTCTCTGAGGCTCTATATCCTGTTTTCAGAATTTTGACC |
| | TTGGAGCCCACGGCCCTGACTATTTGTCCAGCGTGAAAAGAAGAAGAGAGT |
| | TCCTCCAATTCTGACCGAGTGCTGATCATTCCCTAGAGACACCAGTAACCC |
| | CGGGCTTAGCTAACGAAAGTGGGGAGCCTCAGGCTGAAGTAACTTTTCTCT |
| | GCTTCTCCCTGCCCAGCTCAGAGCTGAGGGCCTCCCCCTCCACAGCAACCA |
| | ATCACAACCATAAAGCTACAAGCACGCACTGAAGCACTTTACTGATACTCA |
| | TTCAATTATTCATATGACAGTTGTTTGAGTTTGGTACCATCTTATTTTCCC |
| | CTTATACAGATAAGGAAACTGGGGTGCAGAAAAGTGAATTGACTACAAAGT |
| | AGACATGACTAGTTAACAACACAGCTGGGATCTAAACAGCAATAACTAACA |
| | TTAATGGAGAACTTAAAATGCTCTGAGTGCTGTGTTATGAGCTTTGGTGGA |
| | TGTCACTCCTTTAATCCTCGCAACACCCTGTCGGGTAGTCTCATTTAGCAA |
| | GTATGGAAGTTGAGGCAGGGCAACATTAAGCAACTTACATAACTCATGCAG |
| | TAATTTCTGCAGTTGGGAGATGTTCAGCTTCAGTCCCCGGCCCTATGGCCG |
| | TTCTTTTCCACCCTGTTTCTTCCCCCATAGGAAGAACCCACCTGTAGCCCT |
| | GAGGTTCTTTTCCCAGGATGGCTCCAGGATAAGGATCACTGTAGGTGGTTG |
| | TGGAGTTGACACCCCTGTTGACTCCTTCCCAGCTGATTGTCAGAGCCTTAG |
| | ACCCAGCACGCCTTGGATTAGCTCTGCAGAGTGTCTTGGTTGAGAGAATAA |
| | CCTCACCGTACCCACATGACACGTGATTTGGAAAGAGACTAGAGGCCACAC |
| | TTGATAAATCATGGGGAACAGATGTGTTCCACCCAACAAATGTGATAAGTG |
| | ATCATGCAGCCAGAGCCAGCCTTCCTTCAATCAAGGTTTCCAGGCAGAGCA |
| | AATACCCTAGAGATTCTCTGTGATATAGGAAATTTGGATGAAGGGAGCTAG |
| | AAGAAATACAGGGATTTTTTTTTTTTTTTAAGATGGAGTCTTACTCTGTTG |
| | CTAGGCTGGAGTGCAGTGGTGCGATCTCAGCTCCCTGCAACCTCCACCTCC |
| | TGGGTTCAAACAATTCTCCTGCCTCAGCCTCCCGAGTACTGGGAATATAGG |
| | TGCACGCCACCACACCCAACAAATTTTTGTACTTTTAGTACAGATGAGGGT |
| | TCACTATGTTGGCCAGGATGGTCTCGATCTCTTGACCTCATGATCCACCCA |
| | CCTCGGTCTCCCAAAGTGCTGGGATTACAGGCTTGAGCCACCGGGTGACCG |
| | GCTTACAGGGATATTTTTAATCCCGTTATGGACTCTGTCTCCAGGAGAGGG |
| | GTCTATCCACCCCTGCTCATTGGTGGATGTTAAACCAATATTCCTTTCAAC |
| | TGCTGCCTGCTAGGGAAAAACTACTCCTCATTATCATCATTATTATTGCTC |
| | TCCACTGTATCCCCTCTACCTGGCATGTGCTTGTCAAGTTCTAGTTGTTCA |
| | ATAAATTTGTTAATAATGCTGA (SEQ ID NO: 93) |
| | >NP_008979.3 butyrophilin subfamily 3 member A1 |
| | isoform a precursor [Homo sapiens] |
| | MKMASFLAFLLLNFRVCLLLLQLLMPHSAQFSVLGPSGPILAMVGEDADLP |
| | CHLFPTMSAETMELKWVSSSLRQVVNVYADGKEVEDRQSAPYRGRTSILRD |
| | GITAGKAALRIHNVTASDSGKYLCYFQDGDFYEKALVELKVAALGSDLHVD |
| | VKGYKDGGIHLECRSTGWYPQPQIQWSNNKGENIPTVEAPVVADGVGLYAV |
| | AASVIMRGSSGEGVSCTIRSSLLGLEKTASISIADPFFRSAQRWIAALAGT |
| | LPVLLLLLGGAGYFLWQQQEEKKTQFRKKKREQELREMAWSTMKQEQSTRV |
| | KLLEELRWRSIQYASRGERHSAYNEWKKALFKPADVILDPKTANPILLVSE |
| | DQRSVQRAKEPQDLPDNPERFNWHYCVLGCESFISGRHYWEVEVGDRKEWH |
| | IGVCSKNVQRKGWVKMTPENGFWTMGLTDGNKYRTLTEPRTNLKLPKPPKK |
| | VGVFLDYETGDISFYNAVDGSHIHTFLDVSFSEALYPVFRILTLEPTALTI |
| | CPA (SEQ ID NO: 94) |
| Human | >NM_007047.5 Homo sapiens butyrophilin subfamily 3 |
| BTN3A2 | member A2 (BTN3A2), transcript variant 1, mRNA |
| | GACTCTTACTGTTTCTCATGGTGAGAAGACAATATTTGCTTTCTCTTTTTC |
| | CTTTCTTCCGGATGAGAGGCTAAGCCATAATAGAAAGAATGGAGAATTATT |
| | GATTGACCGTCTTTATTCTGTGGGCTCTGATTCTCCAATGGGAATACCAAG |
| | GGATGGTTTTCCATACTGGAACCCAAAGGTAAAGACACTCAAGGACAGACA |
| | TTTTTGGCAGAGCATAGATGAAAATGGCAAGTTCCCTGGCTTTCCTTCTGC |
| | TCAACTTTCATGTCTCCCTCCTCTTGGTCCAGCTGCTCACTCCTTGCTCAG |
| | CTCAGTTTTCTGTGCTTGGACCCTCTGGGCCCATCCTGGCCATGGTGGGTG |
| | AAGACGCTGATCTGCCCTGTCACCTGTTCCCGACCATGAGTGCAGAGACCA |
| | TGGAGCTGAAGTGGGTAAGTTCCAGCCTAAGGCAGGTGGTGAACGTGTATG |
| | CAGATGGAAAGGAAGTGGAAGACAGGCAGAGTGCACCGTATCGAGGGAGAA |
| | CTTCGATTCTGCGGGATGGCATCACTGCAGGGAAGGCTGCTCTCCGAATAC |
| | ACAACGTCACAGCCTCTGACAGTGGAAAGTACTTGTGTTATTTCCAAGATG |
| | GTGACTTCTATGAAAAAGCCCTGGTGGAGCTGAAGGTTGCAGCACTGGGTT |
| | CTAATCTTCACGTCGAAGTGAAGGGTTATGAGGATGGAGGGATCCATCTGG |
| | AGTGCAGGTCCACCGGCTGGTACCCCCAACCCCAAATACAGTGGAGCAACG |
| | CCAAGGGAGAGAACATCCCAGCTGTGGAAGCACCTGTGGTTGCAGATGGAG |
| | TGGGCCTATATGAAGTAGCAGCATCTGTGATCATGAGAGGCGGCTCCGGGG |
| | AGGGTGTATCCTGCATCATCAGAAATTCCCTCCTCGGCCTGGAAAAGACAG |
| | CCAGCATTTCCATCGCAGACCCCTTCTTCAGGAGCGCCCAGCCCTGGATCG |
| | CAGCCCTGGCAGGGACCCTGCCTATCTTGCTGCTGCTTCTCGCCGGAGCCA |
| | GTTACTTCTTGTGGAGACAACAGAAGGAAATAACTGCTCTGTCCAGTGAGA |
| | TAGAAAGTGAGCAAGAGATGAAAGAAATGGGATATGCTGCAACAGAGCGGG |
| | AAATAAGCCTAAGAGAGAGCCTCCAGGAGGAACTCAAGAGGAAAAAAATCC |
| | AGTACTTGACTCGTGGAGAGGAGTCTTCGTCCGATACCAATAAGTCAGCCT |
| | GATGCTCTAATGGAAAAATGGCCCTCTTCAAGCCTGGTGAGGAAATGCTTC |
| | AGATGAGGCTCCACCTTGTTAAATAAATTGGATGTATGGAAAAATAGACTG |
| | CAGAAAAGGGGAACTCATTTAGCTCACGAGTGGTCGAGTGAAGATTGAAAA |
| | TTAACCTCTGAGGGCCAGCACAGCAGCTCATGCCTGTAATCCTAGCACTTT |
| | GGAAGGCTGAGGAGGGCGGATCACAAGGTCAGGAGATCAAGACCATCCTGG |
| | CTAACACGGTGAAACCCCGTCTCTACTAAAAATACAAAAAATAAAAAATTA |
| | GCCGGGCATGGTGACGGGCACCTGTAGTCCCAGCTACTCGGGAGGCTGAGG |
| | CAGGAGAATGGCATGAACCCGGAAGGCAGAGCTTGCAGTGAGCCGAGATCA |
| | CGCCACTGCACTCCAGCCTGGGAGACAGAGCGAGACTCTGTCTCAAGAAAA |
| | AAAAAAAAAAAAAAAAAGAAAAGAAAATTAACCTCTGAGTATAAAGCATCA |
| | GTGGGCAGAATCAATGTGGGGAGGGAAACAACAAAAATGTAGAAAGAGGAT |
| | CCTTGTTGCTTCTTGGGGCCGCATCAGGGTATTGGGTTAGGCAGATACTGA |
| | CCTTACTTTCATTTCCCCTCTGGTCACTAGACCCCTGGGGCTTTCACCAAT |
| | GACATTGATGAGAGAATCACATTCAGGGCAGGCTAGGGACACGGGGTTCTG |
| | GAAGGACCTCCTCAGCATGGCCCAAGCCTTGCATGCTGTGGCTCTTAAATC |
| | CAGGAAAAATGGCTGACCCCATGGACACCTCCTCAAACTCTCTGCAGCAGA |
| | TGTAATTCTGTATCCAGACATGGCAAATGCCATCCTCCTTGTTTCTGAGGA |
| | CCAGAGGAGTGTACAGCGTGCTGAGGAGCCCCATGACCTACCAGACAACCC |
| | TGAGAGATTTGAATGGCGTTACTGTGTGCTTGGCTGTGAAAGCTTCATGTC |
| | AGAGAGACACTACTGGGAGGTGGAAGTGGGGGACAGAAAAGAGTGGCATAT |
| | TGGGGTATGTAGTAAGAACGTGGAGAGGAAAAAAGTTTGGGTCAAAATGAC |
| | ACCGGAGAACGGATACTGGACTATGGGCCTGACTGATGGGAATAAGTATCG |
| | GGCTCTCACTGAGCCCAGAACCAACCTGAAACTTCCTGAGCCTCCTAGGAA |
| | AGTGGGGGTCATCCTGGACTATGAGACTGGACATATCTCGTTCTACAATGC |
| | CACGGATGGATCTCATATCTACACATTTCTGCACGCCTCTTCCTCTGAGCC |
| | TCTGTATCCTGTATTCAGAATTTTGACCTTGGAGCCCACTGCCCTGACCGT |
| | TTGCCCAATACCAAAAGTAGAGAGTTCCCCCGATCCCGACCTAGTGCCTGA |
| | TCATTCCCTGGAGATACCACTGACCCCAGGCTTAGCTAATGAAAGTGGGGA |
| | GCCTCAGGCTGAAGTAACATCTCTGCTTCTCCCTGCCCAGCCTGGAGCTAA |
| | GGGTCTCACCCTCCACAACAGCCAGTCAGAACCATAAAGCTACAGGCACAC |
| | ACTGAAGCACTTTACTGATATTCATTCAATTATTCCATAGGACAGTTGTTT |
| | GAGTTTGGTGCCACCTTATTGGCCCCTTTATACAGATAAGGAAACTGGGGT |
| | GTAGAAAAGTGTATTGACTTTACAAAGCAGACAGGAATAGTGAACAACAGA |
| | GCTGGGATCTGAACAACAATGACTAACATTAATGGAGAATTTAAAACGTTC |
| | TGAGTGCTGTGTTATGAGCTTTGGTGGGTGTCACTCCTTTAATCCTCACAA |
| | CACCCTGTCAGGTAGTCTCATTTGGCAAGTATGGAAGCAGAGGCAGGGCAA |
| | CATTAAGTAGCTTACATAACTCACACGGTAATTTGTGCAGTTGGGAGATGT |
| | TCAGCTTCAGTCCCTGGCCAATTGCCCGTTCTTTTCCAGCCTGATTTTTCC |
| | TGCATGGGAAGAGCCCACATGTAGCCCTGAGGTTCCCTTCCCAGGACAGCT |
| | CCAGGATCGAGATCACTGTGAGTGGTTGTGGAGTTAAGACCCCTATGGACT |
| | CCTTCCCAGCTGATTATCAGAGCCTTAGACCCAGCACTCCTTGGATTGGCT |
| | CTGCAGAGTGTCTTGGTTGAGAGAATAACGTTGCAGTTCCCACAGGGCATG |
| | TGACTTTGAAAGAGACTAGAGGCCACACTCAGTTAATAATGGGGCACAGAT |
| | GTGTTCCCACCCAACAAATGTGATAAGTGATCGTGCAGCCAGAGCCAGCCT |
| | TCCTTCAGTCAAGGTTTCCAGGCAGAGCAAATACCCTAGAGATTCTCTGTA |
| | ATATTGGTAATTTGGATGAAGGAAGCTAGAAGAATTACAGGGATGTTTTTA |
| | ATCCCACTATGGACTCAGTCTCCTGGAAAAGGATCTGTCCACTCCTGGTCA |
| | TTGGTGGATGTTAAACCCATATTCCTTTCAACTGCTGCCTGCTAGGGAAAA |
| | CTGCTCCTCATTATCATCACTATTATTGCTCACCACTGTATCCCCTCTACT |
| | GGGCAAGTGCTTGTCAAGTTCTAGTTGTTCAATAAATTTGTTAATAATGCT |
| | GA (SEQ ID NO: 95) |
| | >NP_008978.2 butyrophilin subfamily 3 member A2 |
| | isoform a precursor [Homo sapiens] |
| | MKMASSLAFLLLNFHVSLLLVQLLTPCSAQFSVLGPSGPILAMVGEDADLP |
| | CHLFPTMSAETMELKWVSSSLRQVVNVYADGKEVEDRQSAPYRGRTSILRD |
| | GITAGKAALRIHNVTASDSGKYLCYFQDGDFYEKALVELKVAALGSNLHVE |
| | VKGYEDGGIHLECRSTGWYPQPQIQWSNAKGENIPAVEAPVVADGVGLYEV |
| | AASVIMRGGSGEGVSCIIRNSLLGLEKTASISIADPFFRSAQPWIAALAGT |
| | LPILLLLLAGASYFLWRQQKEITALSSEIESEQEMKEMGYAATEREISLRE |
| | SLQEELKRKKIQYLTRGEESSSDTNKSA (SEQ ID NO: 96) |
| Human | >NM_007049.5 Homo sapiens butyrophilin subfamily 2 |
| BTN2A1 | member A1 (BTN2A1), transcript variant 1, mRNA |
| | AGATTTCGTTTCCTGCATCTCCAAACATGGCGACCTAGGAGAAGGGGAAGA |
| | ACAATTTTTTCTCCTCTTTTGGGAAGGTTTGTGTCTAGTAGTGCCTGTGCC |
| | CCTGGGCAGATTGGAGAGAAGAGGGACGACTGGAGAATCGTCGAGAACCAG |
| | CGGAGAAAAGAAAAAGCAACGTTTAATTCTAGAAGGCCTCCTGTCCCTGCC |
| | TGCTCTGGGTGCTCATGGAATCAGCTGCTGCCCTGCACTTCTCCCGGCCAG |
| | CCTCCCTCCTCCTCCTCCTCCTCAGCCTGTGTGCACTGGTCTCAGCCCAGT |
| | TTATTGTCGTGGGGCCCACTGATCCCATCTTGGCCACGGTTGGAGAAAACA |
| | CTACGTTACGCTGCCATCTGTCACCCGAGAAAAATGCTGAGGACATGGAGG |
| | TGCGGTGGTTCCGGTCTCAGTTCTCCCCCGCAGTGTTTGTGTATAAAGGTG |
| | GCAGAGAGAGAACAGAGGAGCAGATGGAGGAGTACCGAGGAAGAACCACCT |
| | TTGTGAGCAAAGACATCAGCAGGGGCAGCGTGGCCCTGGTCATACACAACA |
| | TCACAGCCCAGGAAAACGGCACCTACCGCTGTTACTTCCAAGAAGGCAGGT |
| | CCTACGATGAGGCCATCCTGCACCTCGTAGTGGCAGGACTAGGCTCTAAGC |
| | CCCTCATTTCAATGAGGGGCCATGAAGACGGGGGCATCCGGCTGGAGTGCA |
| | TATCTAGAGGGTGGTACCCAAAGCCCCTCACAGTGTGGAGGGACCCCTACG |
| | GTGGGGTTGCGCCTGCCCTGAAAGAGGTCTCCATGCCTGATGCAGACGGCC |
| | TCTTCATGGTCACCACGGCTGTGATCATCAGAGACAAGTCTGTGAGGAACA |
| | TGTCCTGCTCTATCAACAACACCCTGCTCGGCCAGAAGAAAGAAAGTGTCA |
| | TTTTTATTCCAGAATCCTTTATGCCCAGTGTGTCTCCCTGTGCAGTGGCCC |
| | TGCCTATCATTGTGGTTATTCTGATGATACCCATTGCCGTATGCATCTATT |
| | GGATCAACAAACTCCAAAAGGAAAAAAAGATTCTGTCAGGGGAAAAGGAGT |
| | TTGAACGGGAAACAAGAGAAATTGCTCTAAAGGAACTGGAGAAAGAACGTG |
| | TGCAAAAAGAGGAAGAACTTCAAGTAAAAGAGAAACTTCAAGAAGAATTGC |
| | GATGGAGAAGAACATTCTTACATGCTGTTGATGTGGTCCTGGATCCAGACA |
| | CCGCTCATCCCGATCTCTTCCTGTCAGAGGACCGGAGAAGTGTGAGAAGGT |
| | GCCCCTTCAGGCACCTAGGGGAGAGCGTGCCTGACAACCCAGAGAGATTCG |
| | ACAGTCAGCCTTGTGTCCTAGGCCGGGAGAGCTTCGCTTCAGGGAAACATT |
| | ACTGGGAGGTGGAGGTGGAAAACGTGATTGAGTGGACTGTGGGGGTCTGTA |
| | GAGACAGTGTTGAGAGGAAAGGGGAGGTCCTGCTGATTCCTCAGAATGGCT |
| | TCTGGACCTTGGAGATGCATAAAGGGCAATACCGGGCCGTGTCCTCCCCTG |
| | ATAGGATTCTCCCTTTGAAGGAGTCCCTTTGCCGGGTGGGCGTCTTCCTGG |
| | ACTATGAAGCTGGAGATGTCTCCTTCTACAACATGAGGGACAGATCGCACA |
| | TCTACACATGTCCCCGTTCAGCCTTTTCCGTGCCTGTGAGGCCCTTCTTCA |
| | GGTTGGGGTGTGAGGACAGCCCCATCTTCATCTGCCCTGCACTCACAGGAG |
| | CCAATGGGGTCACGGTGCCTGAAGAGGGCCTGACACTTCACAGAGTGGGGA |
| | CCCACCAGAGCCTATAGAATCAATTCCTTGGTCTCACAGCCATGTAGACAA |
| | GCCCTGGTCATCTCAGCAGCCACCGCACAACACCCCTGGTGGAAGACACGC |
| | CCTCCTCCCCTCTGGTCACACAAGAGAACATCTTCCAGCTGCCTCTTTCAC |
| | ACCCACTACAGACCTCAGCCCCAGTTTTCTCCTCCTCACTAGGCTGTGTTT |
| | TTAGTAGTTCCTTTGCTTGTAACTATGGGATGGGATCCAGGCATAGGGAAC |
| | TAGTTGTTACACAGCTCCCAGCCAAGAAGAAAGTGTGAGAAGTTGATGGGC |
| | AGCAAACCTGCTGTTTAACATCAGGGTGACCACATTAAGCCCAGTATTCCA |
| | GTTGGCACCAGAAGATATGGACTTGGAATGAGGCCTACAGGGTTCACCAGG |
| | ATGTAAGAGGAGAGAGGAATCCACAGGACCACCAGAGAGGAGAGGGAACCA |
| | GATATGCAGATCAGAGATAGAGGAAGTGGAACCAGAGAGCTGGGAGGGACC |
| | AAGGTTGTAAGGGTGGCTAAGTCCCACCATAACAGCTAAGGGGACCTGGGA |
| | GATGATGGCTCATTTCCACCCAGCCCCAGGATTTCCAGAGCGCACATCCAC |
| | AGGCCTGGACCTGGGATGAAGATGAATGAAGAACATGGATGCACGTGGATG |
| | TAGTTTGGCTCAGGTGTCCCTGCAGTTGGCAAGGAGTCAGTACTCAGTCCC |
| | TGAGTGTGGCTGAAATTTGAGGTCCTGGCTGAGCCAAGGAGTAATGGACCA |
| | GATCTACCTCAGTATTCAAGTTCAGTGGGGACACCAGTGGCTTCAAACTTC |
| | CTGGTTTCATGATATCTTGAGACGCCTTACAAATGATGGAGGATTCCAAAG |
| | AGTTTTTGTTTATTTGGGTTAATATTTGTTGGTATTTATGGCATTTGAGAT |
| | TGAAACTAAGAAATGTTTTAATTTATTACCTTTACAACATTTATTTACATT |
| | ACATACATACATTTACAACATTTATTAATTTATATTAAAATAGCATGAATA |
| | AGCCAATTATAGGTTAATATAAGTAGAATGTTTGTGAAAAATAAGTATGGT |
| | ATCCAAAGCAAAATAAATTTTATTGTGAAGTGTG (SEQ ID NO: 97) |
| | >NP_008980.1 butyrophilin subfamily 2 member A1 |
| | isoform 1 precursor [Homo sapiens] |
| | MESAAALHFSRPASLLLLLLSLCALVSAQFIVVGPTDPILATVGENTTLRC |
| | HLSPEKNAEDMEVRWFRSQFSPAVFVYKGGRERTEEQMEEYRGRTTFVSKD |
| | ISRGSVALVIHNITAQENGTYRCYFQEGRSYDEAILHLVVAGLGSKPLISM |
| | RGHEDGGIRLECISRGWYPKPLTVWRDPYGGVAPALKEVSMPDADGLFMVT |
| | TAVIIRDKSVRNMSCSINNTLLGQKKESVIFIPESFMPSVSPCAVALPIIV |
| | VILMIPIAVCIYWINKLQKEKKILSGEKEFERETREIALKELEKERVQKEE |
| | ELQVKEKLQEELRWRRTFLHAVDVVLDPDTAHPDLFLSEDRRSVRRCPFRH |
| | LGESVPDNPERFDSQPCVLGRESFASGKHYWEVEVENVIEWTVGVCRDSVE |
| | RKGEVLLIPQNGFWTLEMHKGQYRAVSSPDRILPLKESLCRVGVFLDYEAG |
| | DVSFYNMRDRSHIYTCPRSAFSVPVRPFFRLGCEDSPIFICPALTGANGVT |
| | VPEEGLTLHRVGTHQSL (SEQ ID NO: 98) |
| Human | >NM_001040462.3 Homo sapiens butyrophilin like 8 |
| BTNL8 | (BTNL8), transcript variant 2, mRNA |
| | AGAACAGCGCAGTTTGCCCTCCGCTCACGCAGAGCCTCTCCGTGGCTTCCG |
| | CACCTTGAGCATTAGGCCAGTTCTCCTCTTCTCTCTAATCCATCCGTCACC |
| | TCTCCTGTCATCCGTTTCCATGCCGTGAGGTCCATTCACAGAACACATCCA |
| | TGGCTCTCATGCTCAGTTTGGTTCTGAGTCTCCTCAAGCTGGGATCAGGGC |
| | AGTGGCAGGTGTTTGGGCCAGACAAGCCTGTCCAGGCCTTGGTGGGGGAGG |
| | ACGCAGCATTCTCCTGTTTCCTGTCTCCTAAGACCAATGCAGAGGCCATGG |
| | AAGTGCGGTTCTTCAGGGGCCAGTTCTCTAGCGTGGTCCACCTCTACAGGG |
| | ACGGGAAGGACCAGCCATTTATGCAGATGCCACAGTATCAAGGCAGGACAA |
| | AACTGGTGAAGGATTCTATTGCGGAGGGGCGCATCTCTCTGAGGCTGGAAA |
| | ACATTACTGTGTTGGATGCTGGCCTCTATGGGTGCAGGATTAGTTCCCAGT |
| | CTTACTACCAGAAGGCCATCTGGGAGCTACAGGTGTCAGCACTGGGCTCAG |
| | TTCCTCTCATTTCCATCACGGGATATGTTGATAGAGACATCCAGCTACTCT |
| | GTCAGTCCTCGGGCTGGTTCCCCCGGCCCACAGCGAAGTGGAAAGGTCCAC |
| | AAGGACAGGATTTGTCCACAGACTCCAGGACAAACAGAGACATGCATGGCC |
| | TGTTTGATGTGGAGATCTCTCTGACCGTCCAAGAGAACGCCGGGAGCATAT |
| | CCTGTTCCATGCGGCATGCTCATCTGAGCCGAGAGGTGGAATCCAGGGTAC |
| | AGATAGGAGATACCTTTTTCGAGCCTATATCGTGGCACCTGGCTACCAAAG |
| | TACTGGGAATACTCTGCTGTGGCCTATTTTTTGGCATTGTTGGACTGAAGA |
| | TTTTCTTCTCCAAATTCCAGTGGAAAATCCAGGCGGAACTGGACTGGAGAA |
| | GAAAGCACGGACAGGCAGAATTGAGAGACGCCCGGAAACACGCAGTGGAGG |
| | TGACTCTGGATCCAGAGACGGCTCACCCGAAGCTCTGCGTTTCTGATCTGA |
| | AAACTGTAACCCATAGAAAAGCTCCCCAGGAGGTGCCTCACTCTGAGAAGA |
| | GATTTACAAGGAAGAGTGTGGTGGCTTCTCAGAGTTTCCAAGCAGGGAAAC |
| | ATTACTGGGAGGTGGACGGAGGACACAATAAAAGGTGGCGCGTGGGAGTGT |
| | GCCGGGATGATGTGGACAGGAGGAAGGAGTACGTGACTTTGTCTCCCGATC |
| | ATGGGTACTGGGTCCTCAGACTGAATGGAGAACATTTGTATTTCACATTAA |
| | ATCCCCGTTTTATCAGCGTCTTCCCCAGGACCCCACCTACAAAAATAGGGG |
| | TCTTCCTGGACTATGAGTGTGGGACCATCTCCTTCTTCAACATAAATGACC |
| | AGTCCCTTATTTATACCCTGACATGTCGGTTTGAAGGCTTATTGAGGCCCT |
| | ACATTGAGTATCCGTCCTATAATGAGCAAAATGGAACTCCCATAGTCATCT |
| | GCCCAGTCACCCAGGAATCAGAGAAAGAGGCCTCTTGGCAAAGGGCCTCTG |
| | CAATCCCAGAGACAAGCAACAGTGAGTCCTCCTCACAGGCAACCACGCCCT |
| | TCCTCCCCAGGGGTGAAATGTAGGATGAATCACATCCCACATTCTTCTTTA |
| | GGGATATTAAGGTCTCTCTCCCAGATCCAAAGTCCCGCAGCAGCCGGCCAA |
| | GGTGGCTTCCAGATGAAGGGGGACTGGCCTGTCCACATGGGAGTCAGGTGT |
| | CATGGCTGCCCTGAGCTGGGAGGGAAGAAGGCTGACATTACATTTAGTTTG |
| | CTCTCACTCCATCTGGCTAAGTGATCTTGAAATACCACCTCTCAGGTGAAG |
| | AACCGTCAGGAATTCCCATCTCACAGGCTGTGGTGTAGATTAAGTAGACAA |
| | GGAATGTGAATAATGCTTAGATCTTATTGATGACAGAGTGTATCCTATGG |
| | TTTGTTCATTATATTACACTTTCAGTAA (SEQ ID NO: 99) |
| | >NP_001035552.1 butyrophilin-like protein 8 isoform |
| | 2 precursor [Homo sapiens] |
| | MALMLSLVLSLLKLGSGQWQVFGPDKPVQALVGEDAAFSCFLSPKTNAEAM |
| | EVRFFRGQFSSVVHLYRDGKDQPFMQMPQYQGRTKLVKDSIAEGRISLRLE |
| | NITVLDAGLYGCRISSQSYYQKAIWELQVSALGSVPLISITGYVDRDIQLL |
| | CQSSGWFPRPTAKWKGPQGQDLSTDSRTNRDMHGLFDVEISLTVQENAGSI |
| | SCSMRHAHLSREVESRVQIGDTFFEPISWHLATKVLGILCCGLFFGIVGLK |
| | IFFSKFQWKIQAELDWRRKHGQAELRDARKHAVEVTLDPETAHPKLCVSDL |
| | KTVTHRKAPQEVPHSEKRFTRKSVVASQSFQAGKHYWEVDGGHNKRWRVGV |
| | CRDDVDRRKEYVTLSPDHGYWVLRLNGEHLYFTLNPRFISVFPRTPPTKIG |
| | VFLDYECGTISFFNINDQSLIYTLTCRFEGLLRPYIEYPSYNEQNGTPIVI |
| | CPVTQESEKEASWQRASAIPETSNSESSSQATTPFLPRGEM (SEQ ID NO: |
| | 100) |
| Human | >NM_006995.5 Homo sapiens butyrophilin subfamily 2 |
| BTN2A2 | member A2 (BTN2A2), transcript variant 1, mRNA |
| | GGGACTTTTTGGACACCCAGAGAACAGGTCCCAGATACCGAGTCCGCAACT |
| | CCAAACATCGCGATTAATAGGAGGCCTCTGGTCTCTGCCTGCCCTGGGTGC |
| | TCATGGAACCAGCTGCTGCTCTGCACTTCTCCCTGCCAGCCTCCCTCCTCC |
| | TCCTCCTGCTCCTCCTCCTTCTCAGCCTGTGTGCACTGGTCTCAGCCCAGT |
| | TTACTGTCGTGGGGCCAGCTAATCCCATCCTGGCCATGGTGGGAGAAAACA |
| | CTACATTACGCTGCCATCTGTCACCCGAGAAAAATGCTGAGGACATGGAGG |
| | TGCGGTGGTTCCGGTCTCAGTTCTCCCCCGCAGTGTTTGTGTATAAGGGTG |
| | GGAGAGAGAGAACAGAGGAGCAGATGGAGGAGTACCGGGGAAGAATCACCT |
| | TTGTGAGCAAAGACATCAACAGGGGCAGCGTGGCCCTGGTCATACATAACG |
| | TCACAGCCCAGGAGAATGGGATCTACCGCTGTTACTTCCAAGAAGGCAGGT |
| | CCTACGATGAGGCCATCCTACGCCTCGTGGTGGCAGGCCTTGGGTCTAAGC |
| | CCCTCATTGAAATCAAGGCCCAAGAGGATGGGAGCATCTGGCTGGAGTGCA |
| | TATCTGGAGGGTGGTACCCAGAGCCCCTCACAGTGTGGAGGGACCCCTACG |
| | GTGAGGTTGTGCCCGCCCTGAAGGAGGTTTCCATCGCTGATGCTGACGGCC |
| | TCTTCATGGTCACCACAGCTGTGATCATCAGAGACAAGTATGTGAGGAATG |
| | TGTCCTGCTCTGTCAACAACACCCTGCTCGGCCAGGAGAAGGAAACTGTCA |
| | TTTTTATTCCAGAATCCTTTATGCCCAGCGCATCTCCCTGGATGGTGGCCC |
| | TAGCTGTCATCCTGACCGCATCTCCCTGGATGGTGTCCATGACTGTCATCC |
| | TGGCTGTTTTCATCATCTTCATGGCTGTCAGCATCTGTTGCATCAAGAAAC |
| | TTCAAAGGGAAAAAAAGATTCTGTCAGGGGAAAAGAAAGTTGAACAAGAGG |
| | AAAAAGAAATTGCACAGCAACTTCAAGAAGAATTGCGATGGAGAAGAACAT |
| | TCTTACATGCTGCTGATGTGGTCCTGGATCCAGACACCGCTCATCCCGAGC |
| | TCTTCCTGTCAGAGGACCGGAGAAGTGTGAGGCGGGGCCCCTACAGGCAGA |
| | GAGTGCCTGACAACCCAGAGAGATTCGACAGTCAGCCTTGTGTCCTGGGAT |
| | GGGAGAGCTTCGCCTCAGGGAAACATTACTGGGAGGTGGAGGTGGAAAACG |
| | TGATGGTGTGGACTGTGGGGGTCTGCAGACACAGTGTTGAGAGGAAAGGGG |
| | AGGTCCTGCTGATTCCTCAGAATGGCTTCTGGACCCTGGAGATGTTTGGAA |
| | ACCAATACCGGGCCCTGTCCTCCCCTGAGAGGATTCTCCCTTTGAAGGAGT |
| | CCCTTTGCCGGGTGGGCGTCTTCCTGGACTATGAAGCTGGAGATGTCTCCT |
| | TCTACAACATGAGGGACAGATCGCACATCTACACATGTCCCCGTTCAGCCT |
| | TTACTGTGCCTGTGAGGCCCTTCTTCAGGTTAGGGTCTGATGACAGCCCCA |
| | TCTTCATCTGCCCTGCACTCACAGGAGCCAGTGGGGTCATGGTGCCTGAAG |
| | AGGGCCTGAAACTTCACAGAGTGGGGACCCACCAGAGCCTATAGAATCAAT |
| | TCCTTGGACTCACAGCCATGCAGATAAGCCCTGGCCATCTCAGCAGCCACC |
| | GCACAACCCCCCTAATGAAAGACACGCCCTCCTCCCCTCTGGTCACGTAAG |
| | AGAACATCTTCCAGCTGCCTTTTTCACACCCACTCCAGCCCTCTGCCCCAG |
| | TTTTCTCCTCCTCACTAGTCTGTGGCTTTAGTAGTTCCTTTGCTTGTAATT |
| | ATGGGATGGGATCCAGGCATAGGGAACTAGTTGTTTCATAGCTCCCAGTCA |
| | AAAAGAAAGTGAGAGAAGCTGTTGGGCAGCGAACCTACTGTTTAAAATCAG |
| | GATAACCACATTAAGCCCAATATGCCAGTTGGCACCAGATGCTGTGGACTT |
| | GGAATGAGGCCAACAGGGTTCACCAGGATGAGAGAGGAGAGAGGAATCCAC |
| | AGGACCACCAGAAGGGAGAGGGAACCAGATATGCAGATCAGAGATAGAGGA |
| | AGTGGAACCAGAGAGCTGGGAGGGACCAAGGTTGTAAGGATGGCTAAGTCC |
| | CACCATAAGAGCTAAAGGGTCCTGGGAGATGATGGCTCATTTCCACCCAAC |
| | CCCAGGATTTCCACAGCACACACCCACAGGCCTGGACCTGGGATGAAGATG |
| | AATGAAGAACATGGACTCATGTGGATGTGGTTTGGCTCAGATGTCCCTGCA |
| | ATAAACAAGGGGTCAGTACTTAGTCCCTGAGTGTGGTTGAGGTTTGAGGTC |
| | CTGGTCGAGCAGGGCAGTACTGGACCAGGTCTACGTCAGCATTCAGGTTCA |
| | ATGGGGACACCAGTGGCTTCAAACTTCCTGATCTAATTATGTTTTTAGACA |
| | CTTAGAAGTTATTGAGGACTTTAAAGAGCTTTTGTTTATTTGGGTTAATAT |
| | TTATGACATTTGACATTGAAACAAAAATTTAAAATGTTATCTTTTAATTTA |
| | TGTTAAAATAGCATTAATAAATCAGTTATAGGTTAATGTAGATAGGATGTT |
| | TTGTGAAAAAGCAATCTATTGTGTCCAAATAAAAAAACAAAAAGTGTGACA |
| | CTGGTTAACTTTTTCCAGATCTCATGTCTGGCTTAATAAGAGATATTTGTA |
| | TTATCATATCTGCCTTTGTATTAAACCTATTGGTATATCATAGGTCATGTT |
| | AGCTCAAAAAAACTTTACTGCACACTACTGAGAGAATGAGATGAAAAACGA |
| | TTAATGTTTCATTATTATTATTGTGAAAATATTATTAACACTGGGGACTCC |
| | TTAAGAGTACATCAGAGTTCTCTCTAGGAATCCCAAAACCACATTTTGAAA |
| | CTAGAATAGTGGATCCTGGAAGTTAATCCATGTGCTGGTTAATTTTAGATG |
| | TCAACCTGACTGGATTAAGGAATACCTAGACAGCTGGTACAACATTATTTC |
| | TGGGTGTGTCTGTGAGTGTGTTTCCAGAAGAGATTGGCAAGTGAGTCAGTG |
| | GGAAATTCTCTCCTTCTGTTGGCTGGGTGCCCAATACAACAAAAAGGCAGA |
| | GGAAAGGCAAATTCTTCTCTCCTCTGGAGCTGAGACACTCTTCTTCTTCTG |
| | CCCTTGGACATCAGAACTCCTGGCTCTCCGGCCTTTGAACTTCAGGACTTG |
| | TACCAGGAGGCCCTGGGTTCTCAGGCCTTTGGCTTTGGACTGAGAGTTACA |
| | CAATCAGCTTCCCTGGTTCTGAGGCTTTCAGACTTAAACTGAGCCATGCTA |
| | CCAGCATCCCAGGGTCTCCAGCCTACAGATGAGCTGTTGTGCGATTTCTTA |
| | GCCTCCATAATCACATGAGCCAATCTCCTTAATAAATGCCTGCTCATAGAT |
| | CTGTATCTACATCTATATCTGTATGTGCATCTATATCTATGCCTATATCTA |
| | TATCTATATCATATTGATTTTGTCTCTCTGGAGAACCCTGACTAATAAAAT |
| | GAGGCATCTAAAA (SEQ ID NO: 101) |
| | >NP_008926.2 butyrophilin subfamily 2 member A2 |
| | isoform a precursor [Homo sapiens] |
| | MEPAAALHFSLPASLLLLLLLLLLSLCALVSAQFTVVGPANPILAMVGENT |
| | TLRCHLSPEKNAEDMEVRWFRSQFSPAVFVYKGGRERTEEQMEEYRGRITF |
| | VSKDINRGSVALVIHNVTAQENGIYRCYFQEGRSYDEAILRLVVAGLGSKP |
| | LIEIKAQEDGSIWLECISGGWYPEPLTVWRDPYGEVVPALKEVSIADADGL |
| | FMVTTAVIIRDKYVRNVSCSVNNTLLGQEKETVIFIPESFMPSASPWMVAL |
| | AVILTASPWMVSMTVILAVFIIFMAVSICCIKKLQREKKILSGEKKVEQEE |
| | KEIAQQLQEELRWRRTFLHAADVVLDPDTAHPELFLSEDRRSVRRGPYRQR |
| | VPDNPERFDSQPCVLGWESFASGKHYWEVEVENVMVWTVGVCRHSVERKGE |
| | VLLIPQNGFWTLEMFGNQYRALSSPERILPLKESLCRVGVFLDYEAGDVSF |
| | YNMRDRSHIYTCPRSAFTVPVRPFFRLGSDDSPIFICPALTGASGVMVPEE |
| | GLKLHRVGTHQSL (SEQ ID NO: 102) |
| Mouse | >NM_175938.3 Mus musculus butyrophilin, subfamily 2, |
| BTN2A2 | member A2 (Btn2a2), transcript variant 1, mRNA |
| | GAAATTGTGAGACTTGCACGCGGAATGGGTCCTCCGAGGTCTGCTGTCGCG |
| | AGTCCCAGCACTTTGCAAGTAATGGAGAACAGAAAATTCTTTCCTCTCTAC |
| | TGTAGCAGTTTGTTCTCTGGTGGCGACTGTGCTCAGCGACAAGTTGGAGAG |
| | TAGAGAAAAGGCAAGATAATCAGCATTTGAGGGTCAGAGAAGAAAAGAAAA |
| | CGCAGTTAATTCTAGAAGGTTTTCTGTCCACACGTGACCTAGGTGACTCTG |
| | TCCTGAAGACCTATGGAGCCTACAACTTCCCTGCGTTCTTGCCCGATAGCC |
| | TCCCTTCTCTTCTTCTTGGTCCTCAGCCTGTTTGTGCTGGTCTCAGCCCAG |
| | TTTACTGTCATAGGACCAGCTGAGCCCATCCTGGCCATGGTAGGAGAGAAT |
| | ACCACACTACACTGCCACCTGTCACCAGAGAGAAATGCCGAAGAGATGGAG |
| | GTGCGGTGGTTCCGGTGGCGTTTCTTCCCTGCAGTGCTGGTGTACAGAGGC |
| | CATCAAGAGAGACCAGAGGAGCAGATGGTGGCATACCGAGGAAGAACCACC |
| | TTCATGCGCACAGACATCAGCAAGGGAAGAGTTGCGCTCATTATCCACAAT |
| | GTCACAGCCTATGACAATGGCATCTACTGCTGTTACTTCCAGGAAGGCAGG |
| | TCCTATGACCAGGCAACCATGAAGCTTATGGTGGCAAGCCTTGGCTCTGAG |
| | CCACTTATTAAAATGAAGACACTTGAGGATGGGAGCATCTTGCTAGAGTGC |
| | ACATCTGAAGGGTGGTACCCAGAGCCCCGAGCTGTGTGGAGAGACCCCTAT |
| | GATGAAGTTGTACCTGCCCTGGAGGAGGAGTATACAGCTGACAGAGAAGGC |
| | CTCTTCACAGTCACCATGACTATAATCATCAGGGACTGCTCTGTGAGGAAC |
| | ATGACCTGCTCTGTCAATAACACTCTGCTCAGCCAGGAGGTGGAAAGTGTG |
| | ATTCTCATTCCAGAATCCTTCGTGCCCAGCCTTCCTCTGTGGATGGTGGCT |
| | GTGGCTGTCACTCTGCCTGTAGTAATGCTGATTCTCCTCACATCTGGAAGC |
| | ATCTGCCTTGTCAAGAAACACCGCAGGAAGAAATCTATTCTGTCAGCTGAA |
| | AAAGAAGCCGAATATGAAGAGAAGGAAGCTGCACGGCAACTTCAAGAGGAA |
| | CTGCGATGGAGACGAACCCTCTTACATGCTGCTGACGTGGTCCTGGACCCA |
| | GATACAGCTCATCCTGAGCTCTTCCTGTCAGATGACCAGAGAAGTGTAATA |
| | CGAGGCTCTTCGAGGCAGAGTGTGCCTGACAACCCTGAGAGATTTGACTGC |
| | CGTCCATGTGTCCTGGGCAGGGAAAGCTTCTCCTCAGGGAAGCATTACTGG |
| | GAGGTGGAGGTGGAAAATGTAATGGTGTGGGCCATTGGTGTTTGTAGAGAC |
| | AGCGTGGAAAGGAAAGGGGAGGCCCTGTTGGTTCCTCAGAATGGCTTCTGG |
| | ACCCTGGAGATGTTTGGAAGCCAGTATCGAGCCCTGTCCTCCCCAGAAAAG |
| | ATCATACCTCTGAAAGAGCGTCTTCACCGTATAGCTGTCTTCCTGGACTGT |
| | GAGGGTGGAGATATTTCTTTCTACAACATGAGAGACAGATCACACATTTAC |
| | ACATGTCCTCCTGTGACTTTCACTGGGCCCCTGAGACCCTTCTTTAGGCTT |
| | GGTTCTGATGACAGTCCCCTGTTCATCTGTCCAGCATTCACAGGGGCACAG |
| | GGAGTTACAATACCTGAGGGTGGCTTATTCCTATATAAGACAAGACCAATT |
| | TCTCAGAGCCTTGTAAGGAAGCCATAGCTCTCTACACAGTACCATCTGTTG |
| | GAGACTAGACCCCATGTCCTTCAGATCACATGGAGCATCTTCCAGCTGCCA |
| | CCTTCACACATACTTCAGGCCCAGTCCTCAGATTACTACATCATTTCTTCT |
| | AACTATGGGCCTAGGTAGAGCCAGTCTTAGGGGACTATTGCTGTAATACAG |
| | CTCTCTCCTGAGAAGAAAGTGTGAGAAGGGCAGAAAACTTGGAGTTTCAAC |
| | ATGCTGCTCTGGTCACAGTGGATATCAGGCAAGAGCAACAGGGTGGATCAG |
| | GATGTAAGAAGTGAGAACTACAGAGGAAGGAGACAGATAAAGATGAATTGA |
| | GGCCGAAGATGGAGGAAATGGACTGAAGAGCTCTGGGGTAAGCCCTATGTG |
| | ACAGCTGTGGATAGGTAGGAGCTAATGGTCCATTGATATCCAAAGCCAAAG |
| | ATTTAAATATCACATAGTGTGTCTGGAGTGTATATCTGTAGACCTACACAT |
| | GAGAGGAAACAATCATAGTGATGAACTGGATGTAAGCTGGCTCAGACGTCC |
| | CTACAATAAACACTTCTGAGTTCCATGTCTGTGCTCAGTAAGAATGGCTTG |
| | AGGCTTGCGGTCCATGCTGAGCAGCCAGGTCCACATGAATCGGATTTACTA |
| | GAGTAGGTAGCAGTTCAAGTTCCTTAGGCTCAGGATGTCTTCCTTTCCCCC |
| | AAGCCCTTCCCCCTTCAAGATAGGTCTCACTATGTAGACCAGGCCAGCCTC |
| | CACCTCCAGAGTTCTGGGATTAAAGACAAGCACAACCATGTCCAGTTTATG |
| | AGCTTGTGATATATACAGAAGATTAAGTTCTGTGTTCTTGGGTTAGTAACT |
| | GTTGAGATTTGTTTTGAGTCATGCTCTCACTGGCTAGCACTGCTCTTGACT |
| | TTCTCTCCCCATCTTTTTGTTATTGCTTTTCAAGACATGGTTTCACTGTGT |
| | ATTTCTGGCTGATAAGCTGATTTTGAATTCACAGAGATCTGCCTCTGCCTC |
| | CTGAGTGCTGGGATTAAAGGTGTGTTACACTACGCCTGGCTTCACTCTATC |
| | TCTTCAGTGTGGGGATTATAGGTTTATACTATCATGCCTAACTAATGTCTG |
| | TTGCTGCATATGACATTTGAACTTTAGAACAGAAAAACAACTATACATATT |
| | AATATATATTAAACTAATAATAAGC (SEQ ID NO: 103) |
| | >NP_787952.2 butyrophilin subfamily 2 member A2 |
| | isoform 1 precursor [Mus musculus] |
| | MEPTTSLRSCPIASLLFFLVLSLFVLVSAQFTVIGPAEPILAMVGENTTLH |
| | CHLSPERNAEEMEVRWFRWRFFPAVLVYRGHQERPEEQMVAYRGRTTFMRT |
| | DISKGRVALIIHNVTAYDNGIYCCYFQEGRSYDQATMKLMVASLGSEPLIK |
| | MKTLEDGSILLECTSEGWYPEPRAVWRDPYDEVVPALEEEYTADREGLFTV |
| | TMTIIIRDCSVRNMTCSVNNTLLSQEVESVILIPESFVPSLPLWMVAVAVT |
| | LPVVMLILLTSGSICLVKKHRRKKSILSAEKEAEYEEKEAARQLQEELRWR |
| | RTLLHAADVVLDPDTAHPELFLSDDQRSVIRGSSRQSVPDNPERFDCRPCV |
| | LGRESFSSGKHYWEVEVENVMVWATGVCRDSVERKGEALLVPQNGFWTLEM |
| | FGSQYRALSSPEKIIPLKERLHRIAVFLDCEGGDISFYNMRDRSHIYTCPP |
| | VTFTGPLRPFFRLGSDDSPLFICPAFTGAQGVTIPEGGLFLYKTRPISQSL |
| | VRKP (SEQ ID NO: 104) |
| Human | >NM_001732.3 Homo sapiens butyrophilin subfamily 1 |
| BTN1A1 | member A1 (BTN1A1), mRNA |
| | AGCTTTCTCACTTGGTAGCAGTGGCCTCTTGTGCCTTTTTCTCCAAGATCA |
| | CCCAGGCTGAAGCTCCTGAGGGGACTCACATCAGTTATCTTGCTGCTCCAG |
| | AAGGGTGGGAGATGGCAGTTTTCCCAAGCTCCGGTCTCCCCAGATGTCTGC |
| | TCACCCTCATTCTCCTCCAGCTGCCCAAACTGGATTCAGCTCCCTTTGACG |
| | TGATTGGACCCCCGGAGCCCATCCTGGCCGTTGTGGGTGAGGACGCCGAGC |
| | TGCCCTGTCGCCTGTCTCCGAACGCGAGCGCCGAGCACTTGGAGCTACGCT |
| | GGTTCCGAAAGAAGGTTTCGCCGGCCGTGCTGGTGCATAGGGACGGGCGCG |
| | AGCAGGAAGCCGAGCAGATGCCCGAGTACCGCGGGCGGGCGACGCTGGTCC |
| | AGGACGGCATCGCCAAGGGGCGCGTGGCCTTGAGGATCCGTGGCGTCAGAG |
| | TCTCTGACGACGGGGAGTACACGTGCTTTTTCAGGGAGGATGGAAGCTACG |
| | AAGAAGCCCTGGTGCATCTGAAGGTGGCTGCTCTGGGCTCTGACCCTCACA |
| | TCAGTATGCAAGTTCAAGAGAATGGAGAAATCTGTCTGGAGTGCACCTCAG |
| | TGGGATGGTACCCAGAGCCCCAGGTGCAGTGGAGAACTTCCAAGGGAGAGA |
| | AGTTTCCATCTACATCAGAGTCCAGGAATCCTGATGAAGAAGGTTTGTTCA |
| | CTGTGGCTGCTTCAGTGATCATCAGAGACACTTCTGCGAAAAATGTGTCCT |
| | GCTACATCCAGAATCTCCTTCTTGGCCAGGAGAAGAAAGTAGAAATATCCA |
| | TACCAGCTTCCTCCCTCCCAAGGCTGACTCCCTGGATAGTGGCTGTGGCTG |
| | TCATCCTGATGGTTCTAGGACTTCTCACCATTGGGTCCATATTTTTCACTT |
| | GGAGACTATACAACGAAAGACCCAGAGAGAGGAGGAATGAATTCAGCTCTA |
| | AAGAGAGACTCCTGGAAGAACTCAAATGGAAAAAGGCTACCTTGCATGCAG |
| | TTGATGTGACTCTGGACCCAGACACAGCTCATCCCCACCTCTTTCTTTATG |
| | AGGATTCAAAATCTGTTCGACTGGAAGATTCACGTCAGAAACTGCCTGAGA |
| | AAACAGAGAGATTTGACTCCTGGCCCTGTGTGTTGGGCCGTGAGACCTTCA |
| | CCTCAGGAAGGCATTACTGGGAGGTGGAGGTGGGAGACAGGACTGACTGGG |
| | CAATCGGCGTGTGTAGGGAGAATGTGATGAAGAAAGGATTTGACCCCATGA |
| | CTCCTGAGAATGGGTTCTGGGCTGTAGAGTTGTATGGAAATGGGTACTGGG |
| | CCCTCACTCCTCTCCGGACCCCTCTCCCATTGGCAGGGCCCCCACGCCGGG |
| | TTGGGATTTTCCTAGACTATGAATCAGGAGACATCTCCTTCTACAACATGA |
| | ATGATGGATCTGATATCTATACTTTCTCCAATGTCACTTTCTCTGGCCCCC |
| | TCCGGCCCTTCTTTTGCCTATGGTCTAGCGGTAAAAAGCCCCTGACCATCT |
| | GCCCAATTGCTGATGGGCCTGAGAGGGTCACAGTCATTGCTAATGCCCAGG |
| | ACCTTTCTAAGGAGATCCCATTGTCCCCCATGGGGGAGGACTCTGCCCCTA |
| | GGGATGCAGACACTCTCCATTCTAAGCTAATCCCTACCCAACCCAGCCAAG |
| | GGGCACCTTAAGGAATATCTCAGCTCATCTGTTTTCCTTTCCTCTAACCCC |
| | TCTCCTCCATAGCCTTCTGAGGCTTCACCTGCTAGCTTTACCCAGTCTGTT |
| | TCTTCCTGTTGGGTGGCAATTAATTAATCCTGTGAAGGTTACATTGCTGCT |
| | GCTAGAGAGGGTGGGGATTGCACCTTCCAAATCTGTTTCTGTACCAATATT |
| | TGGGGGATGGAGGGGTGACTCAAACTGCTTCTAGTGTTCTCCTAATCCCTT |
| | AAGACTAGAACCTATAGGAAACTACTTGGAGCAAACTCAAAGGACAGATTA |
| | GGGATCGAGATTGGGTCAGGTTAGCATGGGGTTGTGGTTGAAATATCTTGG |
| | TATCCAGGATAAGGGTATGTGGAAAAACAGGCTTTAGGCAAGTGGAAAATT |
| | CAAAATGTGCTGTGAAAGGACAATCTCAGGCTGAAATCCCATAAAGGAACT |
| | TGGAGGGAATATTATGATGGAGGGAAGTGAGGTGAATCCAGGCACATGATG |
| | AACACCTGGCTCATCCATAGAGTTTTCACAGCCTATATCGCAAATTTTCTA |
| | AGCCACGTCCTATAGGACAGAGGAGACTGGCCCCACTTCTATGGGTCTGAG |
| | CTGTGGAAAAGGGAGAGCAGAGAGGAACTGAGATGAGCAGGGATGAAGGGT |
| | CAGGCAGAAAGCGTGATAGAGGAGAGAATTTTTGACAAAACTCAAAAGTTG |
| | TTTGCACAGCTGTTCTTTGTACCCTGTTCCTTTCTCTGCGCCCTCCTGTTT |
| | CTCCCTTGCCTGGAAGTCATTCCACCCTCAATTTGTTGATCCACAAGTTTC |
| | CAGTTGTCCTCTTCTTTTTGTTATAGCATCTCTCTATTTCAAAGACATTCC |
| | TAGAAGTCATCCTTCAGTGATATCACCACTTGCTCAGTCACCATCTCAACC |
| | TTATGTCACCTCAGCCCTCATCTCAATGCCCAAACCCCTTACACACACCTT |
| | CAGTTAGCTTCAACTGCCTCCGTTTCCACACTGTGCACCTTTCACTTTCCC |
| | TACCCAGCTTTCCTACATGCTGCCTCTCCTCAGGGTCCCCTGAATGCTGCA |
| | TCATTGTGTTCAGTGCAGCTGGACTGATTGCACCTGTGTATTTGCCCCTGA |
| | GCACTTTCCTTTACACATGTGGCTTGTCTTGCCAATAGACTCCAGGCTTAT |
| | ACCTTCCATTTCCATCGTATTCTCCAGTTTCCAGGATAGACGTTGCTCATC |
| | GTCTTTACCTAATAAATAAGTTTGTCTGATTGCTGAAA (SEQ ID NO: |
| | 105) |
| | >NP_001723.2 butyrophilin subfamily 1 member A1 |
| | precursor [Homo sapiens] |
| | MAVFPSSGLPRCLLTLILLQLPKLDSAPFDVIGPPEPILAVVGEDAELPCR |
| | LSPNASAEHLELRWFRKKVSPAVLVHRDGREQEAEQMPEYRGRATLVQDGI |
| | AKGRVALRIRGVRVSDDGEYTCFFREDGSYEEALVHLKVAALGSDPHISMQ |
| | VQENGEICLECTSVGWYPEPQVQWRTSKGEKFPSTSESRNPDEEGLFTVAA |
| | SVIIRDTSAKNVSCYIQNLLLGQEKKVEISIPASSLPRLTPWIVAVAVILM |
| | VLGLLTTGSIFFTWRLYNERPRERRNEFSSKERLLEELKWKKATLHAVDVT |
| | LDPDTAHPHLFLYEDSKSVRLEDSRQKLPEKTERFDSWPCVLGRETFTSGR |
| | HYWEVEVGDRTDWAIGVCRENVMKKGFDPMTPENGFWAVELYGNGYWALTP |
| | LRTPLPLAGPPRRVGIFLDYESGDISFYNMNDGSDIYTFSNVTFSGPLRPF |
| | FCLWSSGKKPLTICPIADGPERVTVIANAQDLSKEIPLSPMGEDSAPRDAD |
| | TLHSKLIPTQPSQGAP (SEQ ID NO: 106) |
| Mouse | >NM_013483.3 Mus musculus butyrophilin, subfamily 1, |
| BTN1A1 | member A1 (Btnlal), mRNA |
| | AACAGCACACAGCCTTCTTCCTTCTGAAGAGCTCTCTCTTTGGCCCCGGGG |
| | TGACAAGCAGCCCTTTTCACTTGATCACTGTGGCTCTGGCTCCCTTTTCCT |
| | CTGGGTCTGTCGAAATCGCCTGAAGCTCTTGGCGGGCTTCATTGCCCCAGT |
| | TAGCTCAGAGATGGCAGTTCCCACCAACTCCTGCCTCCTGGTCTGTCTGCT |
| | CACCCTCACTGTCCTACAGCTGCCCACGCTGGATTCGGCAGCTCCCTTCGA |
| | TGTGACCGCACCTCAGGAGCCAGTGTTGGCCCTAGTGGGCTCAGATGCCGA |
| | GCTGACCTGTGGCTTTTCCCCAAACGCGAGCTCAGAATACATGGAGCTGCT |
| | GTGGTTTCGACAGACGAGGTCGACAGCGGTACTTCTATACCGGGATGGCCA |
| | GGAGCAGGAGGGCCAGCAGATGACGGAGTACCGCGGGAGGGCGACGCTGGC |
| | GACAGCCGGGCTTCTAGACGGCCGCGCTACTCTGCTGATCCGAGATGTCAG |
| | GGTCTCAGACCAGGGGGAGTACCGGTGCCTTTTCAAAGACAACGACGACTT |
| | CGAGGAGGCCGCCGTATACCTCAAAGTGGCTGCTGTGGGTTCAGATCCTCA |
| | AATCAGTATGACGGTTCAAGAGAATGGAGAAATGGAGCTGGAGTGCACCTC |
| | CTCTGGATGGTACCCAGAGCCTCAGGTGCAGTGGAGAACAGGCAACAGAGA |
| | GATGCTACCATCCACGTCAGAGTCCAAGAAGCATAATGAGGAAGGCCTGTT |
| | CACTGTGGCAGTTTCAATGATGATCAGAGACAGCTCCATAAAGAACATGTC |
| | CTGCTGCATCCAGAATATCCTCCTTGGCCAGGGGAAGGAAGTAGAGATCTC |
| | CTTACCAGCTCCCTTCGTGCCAAGGCTGACTCCCTGGATAGTAGCTGTGGC |
| | TATCATCTTACTGGCCTTAGGATTTCTCACCATTGGGTCCATATTTTTCAC |
| | TTGGAAACTATACAAGGAAAGATCCAGTCTGCGGAAGAAGGAATTTGGCTC |
| | TAAAGAGAGACTTCTGGAAGAACTCAGATGCAAAAAGACTGTACTGCATGA |
| | AGTTGACGTGACTCTGGATCCAGACACAGCCCACCCCCACCTCTTCCTGTA |
| | TGAAGATTCAAAGTCAGTTCGATTGGAAGATTCACGTCAGATCCTGCCTGA |
| | TAGACCAGAGAGATTTGACTCCTGGCCCTGTGTGTTGGGCCGTGAGACCTT |
| | TACTTCAGGGAGACATTACTGGGAGGTGGAGGTGGGAGATAGAACTGACTG |
| | GGCCATTGGTGTGTGTAGGGAGAATGTGGTGAAGAAAGGGTTTGACCCCAT |
| | GACTCCTGATAATGGGTTCTGGGCTGTGGAGTTGTATGGAAATGGGTACTG |
| | GGCCCTCACCCCACTCAGGACCTCTCTCCGATTAGCAGGGCCCCCTCGCAG |
| | AGTTGGGGTTTTTCTGGACTATGACGCAGGAGACATTTCCTTCTACAACAT |
| | GAGTAACGGATCTCTTATCTATACTTTCCCTAGCATCTCTTTCTCTGGCCC |
| | CCTCCGTCCCTTCTTTTGTCTGTGGTCCTGTGGTAAAAAGCCCCTGACCAT |
| | CTGTTCAACTGCCAATGGGCCTGAGAAAGTCACAGTCATTGCTAATGTCCA |
| | GGACGACATTCCCTTGTCCCCGCTGGGGGAAGGCTGTACTTCTGGAGACAA |
| | AGACACTCTCCATTCTAAACTGATCCCGTTCTCACCTAGCCAAGCGGCACC |
| | ATAACAAATATTCCAGCTTCACGACTTTGCCTTCCTTTGACTAATCCCTCA |
| | TGCCCCGAAGCTTCAGCTGTTGGCTTCTTGCAGCCCTGCTTCTTCCTGGTG |
| | GATGGAGATTAATTCACATTGGGAAGGTTAGGTATGTTGCTGCCAGACAAG |
| | GCAGGAAGAAAGGCCATCCTAGTTTGTTTCTGTACTAACAGTGGGGAGGAA |
| | GAGAGCTGAATCCTAAACTATTTCCAGTGCTCATATTCCTTCAGGCCAGAG |
| | CCTATAGAGAAGGATTTGGTACAATCACTCGAGGGATCAAGAGGCAATTAG |
| | GTTGGCATGGAATTATGGCAGAAACATCTGGAATAGGGGTATGTGGAATGA |
| | CAGGTTTTAGGTAAGGGAGAACAAAACCAAACCATAGGATGCTGAGAAAGA |
| | AAGATCTTGGACTAAACTCCTAAAAAAGCACTTAGAGAAGATATGACAGGC |
| | AAATGAAGTGAATTTGGTCTAATTTGATACACTTGCCCTGTCCCTAGGGTT |
| | TTTCAGTTATATCTCAATTTTTTTGTTGTTAATTACATTTTTGACAGCTTC |
| | ATACATGTATATAATGCATTCTAATTACTCTCACTCTCCTCTATTCTGTCT |
| | TATTTCCCTCCCCTCCCCTCATACCTTCCTTCTTGCTTCAAACCTGGCACA |
| | CTGAGTTTAATGGGCTATCATGGGAACATGGATTTAGAGCTTTCCTCTGAG |
| | CTCAAGAGAGCAGGTGTGACTGAATACAGTGATTTCCCCTCTCCTACAATC |
| | AATCAGCAGTCAATAGCTCAGCTGGGAGGGGTAGGGCCTCATGAGACTTCC |
| | CCTATCAAGGCTAAATGTTGAAAGGGCCAGTTTTTAGCACCTGTGAGATCA |
| | TGATTGCAAGAGCCCAGAAGACAGCATTGCTCGGTCATTCTCCCTACCCTT |
| | TGGCTTTTCTGGTCTTTTGTCCTCTCTTTCAGGATGTGTCTGAACTCTGTA |
| | TCTTAAGTTTTCTATGTCATGTTCTATAAGATAGAGGAGACTGGCCCTGCT |
| | TGTTTGAGAGCAATGTGAGCAAGCTAGCAAGAGACAGAAAGGAGCGGAGAT |
| | GAATAGGGGTAGAGAAAATTTTTAAACAAACCCTCCAGGTGTGTGTGTGTG |
| | TGTGTGTGTCTTCCTCTTTTTTGACCTCCCTAAAGGTCAATCCAACCTCAC |
| | ATTATTGACTCCACTAGGTGGGGGTTCTGTGTGTGTGTGTGTGTGTGTGTG |
| | TGTGTGTGTGTGTGTTTTAAGATAGAGGTTTACTATGTAGCTTAGGCTGGC |
| | TTTGAATTCCTGATCCTCCTGCCTCTACCTTCCAAGTGCTGGAAACATAGC |
| | CACATCCACCACCCCTATCCAGTCCACCTGGTTTGATTCAGCAACGCTCAG |
| | GTAGCATCGCTGTTTGATCTGGAGCTGCCAGCTCCCTCGGCCCCCACTGCA |
| | ATGCTTAACCCCCTCACAGGCACCTTCCCTTGCCTAACACTGCCATCCTTT |
| | TCCACACTGAGCCATTTGCTCAATGTAGCCTACCCAGGTATCCTGCTTTCT |
| | GGTCCCCAAAGTTACACCATGATGCTCAGCACAGCTGGACAGTTTGTCCCA |
| | ATTTGTGTGTGTCCTCCTGTTTGTATGGGACTTCTTTTTGTCAATGGCCTG |
| | TGTGTGTATCCAAGCTCTTCCACTTCTATTGTATTTTTCCGGCTTCTAAAA |
| | CAGATGTTACCAAATAAAGAAAGAGAAAGAAAAAAAA (SEQ ID NO: 107) |
| | >NP_038511.1 butyrophilin subfamily 1 member A1 |
| | precursor [Mus musculus] |
| | MAVPTNSCLLVCLLTLTVLQLPTLDSAAPFDVTAPQEPVLALVGSDAELTC |
| | GFSPNASSEYMELLWFRQTRSTAVLLYRDGQEQEGQQMTEYRGRATLATAG |
| | LLDGRATLLIRDVRVSDQGEYRCLFKDNDDFEEAAVYLKVAAVGSDPQISM |
| | TVQENGEMELECTSSGWYPEPQVQWRTGNREMLPSTSESKKHNEEGLFTVA |
| | VSMMIRDSSIKNMSCCIQNILLGQGKEVEISLPAPFVPRLTPWIVAVAIIL |
| | LALGFLTIGSIFFTWKLYKERSSLRKKEFGSKERLLEELRCKKTVLHEVDV |
| | TLDPDTAHPHLFLYEDSKSVRLEDSRQILPDRPERFDSWPCVLGRETFTSG |
| | RHYWEVEVGDRTDWAIGVCRENVVKKGFDPMTPDNGFWAVELYGNGYWALT |
| | PLRTSLRLAGPPRRVGVFLDYDAGDISFYNMSNGSLIYTFPSISFSGPLRP |
| | FFCLWSCGKKPLTICSTANGPEKVTVIANVQDDIPLSPLGEGCTSGDKDTL |
| | HSKLIPFSPSQAAP (SEQ ID NO: 108) |
| Human TIGIT | >NM_173799.4 Homo sapiens T cell immunoreceptor with |
| | Ig and ITIM domains (TIGIT), mRNA |
| | ACATCTGCTTCCTGTAGGCCCTCTGGGCAGAAGCATGCGCTGGTGTCTCCT |
| | CCTGATCTGGGCCCAGGGGCTGAGGCAGGCTCCCCTCGCCTCAGGAATGAT |
| | GACAGGCACAATAGAAACAACGGGGAACATTTCTGCAGAGAAAGGTGGCTC |
| | TATCATCTTACAATGTCACCTCTCCTCCACCACGGCACAAGTGACCCAGGT |
| | CAACTGGGAGCAGCAGGACCAGCTTCTGGCCATTTGTAATGCTGACTTGGG |
| | GTGGCACATCTCCCCATCCTTCAAGGATCGAGTGGCCCCAGGTCCCGGCCT |
| | GGGCCTCACCCTCCAGTCGCTGACCGTGAACGATACAGGGGAGTACTTCTG |
| | CATCTATCACACCTACCCTGATGGGACGTACACTGGGAGAATCTTCCTGGA |
| | GGTCCTAGAAAGCTCAGTGGCTGAGCACGGTGCCAGGTTCCAGATTCCATT |
| | GCTTGGAGCCATGGCCGCGACGCTGGTGGTCATCTGCACAGCAGTCATCGT |
| | GGTGGTCGCGTTGACTAGAAAGAAGAAAGCCCTCAGAATCCATTCTGTGGA |
| | AGGTGACCTCAGGAGAAAATCAGCTGGACAGGAGGAATGGAGCCCCAGTGC |
| | TCCCTCACCCCCAGGAAGCTGTGTCCAGGCAGAAGCTGCACCTGCTGGGCT |
| | CTGTGGAGAGCAGCGGGGAGAGGACTGTGCCGAGCTGCATGACTACTTCAA |
| | TGTCCTGAGTTACAGAAGCCTGGGTAACTGCAGCTTCTTCACAGAGACTGG |
| | TTAGCAACCAGAGGCATCTTCTGGAAGATACACTTTTGTCTTTGCTATTAT |
| | AGATGAATATATAAGCAGCTGTACTCTCCATCAGTGCTGCGTGTGTGTGTG |
| | TGTGTGTATGTGTGTGTGTGTTCAGTTGAGTGAATAAATGTCATCCTCTTC |
| | TCCATCTTCATTTCCTTGGCCTTTTCGTTCTATTCCATTTTGCATTATGGC |
| | AGGCCTAGGGTGAGTAACGTGGATCTTGATCATAAATGCAAAATTAAAAAA |
| | TATCTTGACCTGGTTTTAAATCTGGCAGTTTGAGCAGATCCTATGTCTCTG |
| | AGAGACACATTCCTCATAATGGCCAGCATTTTGGGCTACAAGGTTTTGTGG |
| | TTGATGATGAGGATGGCATGACTGCAGAGCCATCCTCATCTCATTTTTTCA |
| | CGTCATTTTCAGTAACTTTCACTCATTCAAAGGCAGGTTATAAGTAAGTCC |
| | TGGTAGCAGCCTCTATGGGGAGATTTGAGAGTGACTAAATCTTGGTATCTG |
| | CCCTCAAGAACTTACAGTTAAATGGGGAGACAATGTTGTCATGAAAAGGTA |
| | TTATAGTAAGGAGAGAAGGAGACATACACAGGCCTTCAGGAAGAGACGACA |
| | GTTTGGGGTGAGGTAGTTGGCATAGGCTTATCTGTGATGAAGTGGCCTGGG |
| | AGCACCAAGGGGATGTTGAGGCTAGTCTGGGAGGAGCAGGAGTTTTGTCTA |
| | GGGAACTTGTAGGAAATTCTTGGAGCTGAAAGTCCCACAAAGAAGGCCCTG |
| | GCACCAAGGGAGTCAGCAAACTTCAGATTTTATTCTCTGGGCAGGCATTTC |
| | AAGTTTCCTTTTGCTGTGACATACTCATCCATTAGACAGCCTGATACAGGC |
| | CTGTAGCCTCTTCCGGCCGTGTGTGCTGGGGAAGCCCCAGGAAACGCACAT |
| | GCCCACACAGGGAGCCAAGTCGTAGCATTTGGGCCTTGATCTACCTTTTCT |
| | GCATCAATACACTCTTGAGCCTTTGAAAAAAGAACGTTTCCCACTAAAAAG |
| | AAAATGTGGATTTTTAAAATAGGGACTCTTCCTAGGGGAAAAAGGGGGGCT |
| | GGGAGTGATAGAGGGTTTAAAAAATAAACACCTTCAAACTAACTTCTTCGA |
| | ACCCTTTTATTCACTCCCTGACGACTTTGTGCTGGGGTTGGGGTAACTGAA |
| | CCGCTTATTTCTGTTTAATTGCATTCAGGCTGGATCTTAGAAGACTTTTAT |
| | CCTTCCACCATCTCTCTCAGAGGAATGAGCGGGGAGGTTGGATTTACTGGT |
| | GACTGATTTTCTTTCATGGGCCAAGGAACTGAAAGAGAATGTGAAGCAAGG |
| | TTGTGTCTTGCGCATGGTTAAAAATAAAGCATTGTCCTGCTTCCTAAGACT |
| | TAGACTGGGGTTGACAATTGTTTTAGCAACAAGACAATTCAACTATTTCTC |
| | CTAGGATTTTTATTATTATTATTTTTTCACTTTTCTACCAAATGGGTTACA |
| | TAGGAAGAATGAACTGAAATCTGTCCAGAGCTCCAAGTCCTTTGGAAGAAA |
| | GATTAGATGAACGTAAAAATGTTGTTGTTTGCTGTGGCAGTTTACAGCATT |
| | TTTCTTGCAAAATTAGTGCAAATCTGTTGGAAATAGAACACAATTCACAAA |
| | TTGGAAGTGAACTAAAATGTAATGACGAAAAGGGAGTAGTGTTTTGATTTG |
| | GAGGAGGTGTATATTCGGCAGAGGTTGGACTGAGAGTTGGGTGTTATTTAA |
| | CATAATTATGGTAATTGGGAAACATTTATAAACACTATTGGGATGGTGATA |
| | AAATACAAAAGGGCCTATAGATGTTAGAAATGGGTCAGGTTACTGAAATGG |
| | GATTCAATTTGAAAAAAATTTTTTTAAATAGAACTCACTGAACTAGATTCT |
| | CCTCTGAGAACCAGAGAAGACCATTTCATAGTTGGATTCCTGGAGACATGC |
| | GCTATCCACCACGTAGCCACTTTCCACATGTGGCCATCAACCACTTAAGAT |
| | GGGGTTAGTTTAAATCAAGATGTGCTGTTATAATTGGTATAAGCATAAAAT |
| | CACACTAGATTCTGGAGATTTAATATGAATAATAAGAATACTATTTCAGTA |
| | GTTTTGGTATATTGTGTGTCAAAAATGATAATATTTTGGATGTATTGGGTG |
| | AAATAAAATATTAACATTA (SEQ ID NO: 109) |
| | >NP_776160.2 T-cell immunoreceptor with Ig and ITIM |
| | domains precursor [Homo sapiens] |
| | MRWCLLLIWAQGLRQAPLASGMMTGTIETTGNISAEKGGSIILQCHLSSTT |
| | AQVTQVNWEQQDQLLAICNADLGWHISPSFKDRVAPGPGLGLTLQSLTVND |
| | TGEYFCIYHTYPDGTYTGRIFLEVLESSVAEHGARFQIPLLGAMAATLVVI |
| | CTAVIVVVALTRKKKALRIHSVEGDLRRKSAGQEEWSPSAPSPPGSCVQAE |
| | AAPAGLCGEQRGEDCAELHDYFNVLSYRSLGNCSFFTETG (SEQ ID NO: |
| | 110) |
| Mouse TIGIT | >NM_001146325.1: 98-823 Mus musculus T cell |
| | immunoreceptor with Ig and ITIM domains (Tigit), mRNA |
| | ATGCATGGCTGGCTGCTCCTGGTCTGGGTCCAGGGGCTGATACAGGCTGCC |
| | TTCCTCGCTACAGGAGCCACAGCAGGCACGATAGATACAAAGAGGAACATC |
| | TCTGCAGAGGAAGGTGGCTCTGTCATCTTACAGTGTCACTTCTCCTCTGAC |
| | ACAGCTGAAGTGACCCAAGTCGACTGGAAGCAGCAGGACCAGCTTCTGGCC |
| | ATTTATAGTGTTGACCTGGGGTGGCATGTCGCTTCAGTCTTCAGTGATCGG |
| | GTGGTCCCAGGCCCCAGCCTAGGCCTCACCTTCCAGTCTCTGACAATGAAT |
| | GACACGGGAGAGTACTTCTGTACCTATCATACGTATCCTGGTGGGATTTAC |
| | AAGGGGAGAATATTCCTGAAGGTCCAAGAAAGCTCAGTGGCTCAGTTCCAG |
| | ACTGCCCCGCTTGGAGGAACCATGGCTGCTGTGCTGGGACTCATTTGCTTA |
| | ATGGTCACAGGAGTGACTGTACTGGCTAGAAAGAAGTCTATTAGAATGCAT |
| | TCTATAGAAAGTGGCCTTGGGAGAACAGAAGCGGAGCCACAGGAATGGAAC |
| | CTGAGGAGTCTCTCATCCCCTGGAAGCCCTGTCCAGACACAAACTGCCCCT |
| | GCTGGTCCCTGTGGAGAGCAGGCAGAAGATGACTATGCTGACCCACAGGAA |
| | TACTTTAATGTCCTGAGCTACAGAAGCCTAGAGAGCTTCATTGCTGTATCG |
| | AAGACTGGCTAA (SEQ ID NO: 111) |
| | >NP_001139797.1 T-cell immunoreceptor with Ig and |
| | ITIM domains precursor [Mus musculus] |
| | MHGWLLLVWVQGLIQAAFLATGATAGTIDTKRNISAEEGGSVILQCHFSSD |
| | TAEVTQVDWKQQDQLLAIYSVDLGWHVASVFSDRVVPGPSLGLTFQSLTMN |
| | DTGEYFCTYHTYPGGIYKGRIFLKVQESSVAQFQTAPLGGTMAAVLGLICL |
| | MVTGVTVLARKKSIRMHSIESGLGRTEAEPQEWNLRSLSSPGSPVQTQTAP |
| | AGPCGEQAEDDYADPQEYFNVLSYRSLESFIAVSKTG (SEQ ID NO: 112) |
| Human | >NM_001252.5 Homo sapiens CD70 molecule (CD70), |
| CD27L | transcript variant 1, mRNA |
| (CD70) | AGAGAGGGGCAGGCTGGTCCCCTGACAGGTTGAAGCAAGTAGACGCCCAGG |
| | AGCCCCGGGAGGGGGCTGCAGTTTCCTTCCTTCCTTCTCGGCAGCGCTCCG |
| | CGCCCCCATCGCCCCTCCTGCGCTAGCGGAGGTGATCGCCGCGGCGATGCC |
| | GGAGGAGGGTTCGGGCTGCTCGGTGCGGCGCAGGCCCTATGGGTGCGTCCT |
| | GCGGGCTGCTTTGGTCCCATTGGTCGCGGGCTTGGTGATCTGCCTCGTGGT |
| | GTGCATCCAGCGCTTCGCACAGGCTCAGCAGCAGCTGCCGCTCGAGTCACT |
| | TGGGTGGGACGTAGCTGAGCTGCAGCTGAATCACACAGGACCTCAGCAGGA |
| | CCCCAGGCTATACTGGCAGGGGGGCCCAGCACTGGGCCGCTCCTTCCTGCA |
| | TGGACCAGAGCTGGACAAGGGGCAGCTACGTATCCATCGTGATGGCATCTA |
| | CATGGTACACATCCAGGTGACGCTGGCCATCTGCTCCTCCACGACGGCCTC |
| | CAGGCACCACCCCACCACCCTGGCCGTGGGAATCTGCTCTCCCGCCTCCCG |
| | TAGCATCAGCCTGCTGCGTCTCAGCTTCCACCAAGGTTGTACCATTGCCTC |
| | CCAGCGCCTGACGCCCCTGGCCCGAGGGGACACACTCTGCACCAACCTCAC |
| | TGGGACACTTTTGCCTTCCCGAAACACTGATGAGACCTTCTTTGGAGTGCA |
| | GTGGGTGCGCCCCTGACCACTGCTGCTGATTAGGGTTTTTTAAATTTTATT |
| | TTATTTTATTTAAGTTCAAGAGAAAAAGTGTACACACAGGGGCCACCCGGG |
| | GTTGGGGTGGGAGTGTGGTGGGGGGTAGTGGTGGCAGGACAAGAGAAGGCA |
| | TTGAGCTTTTTCTTTCATTTTCCTATTAAAAAATACAAAAATCA (SEQ ID |
| | NO: 113) |
| | >NP_001243.1 CD70 antigen isoform 1 [Homo sapiens] |
| | MPEEGSGCSVRRRPYGCVLRAALVPLVAGLVICLVVCIQRFAQAQQQLPLE |
| | SLGWDVAELQLNHTGPQQDPRLYWQGGPALGRSFLHGPELDKGQLRIHRDG |
| | IYMVHIQVTLAICSSTTASRHHPTTLAVGICSPASRSISLLRLSFHQGCTI |
| | ASQRLTPLARGDTLCTNLTGTLLPSRNTDETFFGVQWVRP (SEQ ID NO: |
| | 114) |
| Mouse CD27L | >NM_011617.2 Mus musculus CD70 antigen (Cd70), mRNA |
| (CD70) | GAAGGTGCCAAAAGCTCCAGGGGATTTCCCTGCCCTCCGAGAAGAGGCCCA |
| | GTTCTTCCCCTGCATCGGACATCCCCGAGGTTCTAAGGGCAGGTCAAGGCA |
| | GGCAGAAGCTTCAAAAGCTCGGCTGAGGAGGCTACAGCTTCCCGCTGCCTT |
| | CAGGCCGCTGCTTCCGTGCAGGGATGCCGGAGGAAGGTCGCCCTTGCCCCT |
| | GGGTTCGCTGGAGCGGGACCGCGTTCCAGCGCCAATGGCCATGGCTGCTGC |
| | TGGTGGTGTTTATTACTGTGTTTTGCTGTTGGTTTCATTGTAGCGGACTAC |
| | TCAGTAAGCAGCAACAGAGGCTGCTGGAGCACCCTGAGCCGCACACAGCTG |
| | AGTTACAGCTGAATCTCACAGTTCCTCGGAAGGACCCCACACTGCGCTGGG |
| | GAGCAGGCCCAGCCTTGGGAAGGTCCTTCACACACGGACCAGAGCTGGAGG |
| | AGGGCCATCTGCGTATCCATCAAGATGGCCTCTACAGGCTGCATATCCAGG |
| | TGACACTGGCCAACTGCTCTTCCCCAGGCAGCACCCTGCAGCACAGGGCCA |
| | CCCTGGCTGTGGGCATCTGCTCCCCCGCTGCGCACGGCATCAGCTTGCTGC |
| | GTGGGCGCTTTGGACAGGACTGTACAGTGGCATTACAGCGCCTGACATACC |
| | TGGTCCACGGAGATGTCCTCTGTACCAACCTCACCCTGCCTCTGCTGCCGT |
| | CCCGCAACGCTGATGAGACCTTCTTTGGAGTTCAGTGGATATGCCCTTGAC |
| | CACAACTCCAGGATGACTTGTGAATATTTTTTTTCTTTTCAAGTTCTACGT |
| | ATTTATAAATGTATATAGTACACATA (SEQ ID NO: 115) |
| | >NP_035747.1 CD70 antigen [Mus musculus] |
| | MPEEGRPCPWVRWSGTAFQRQWPWLLLVVFITVFCCWFHCSGLLSKQQQRL |
| | LEHPEPHTAELQLNLTVPRKDPTLRWGAGPALGRSFTHGPELEEGHLRIHQ |
| | DGLYRLHIQVTLANCSSPGSTLQHRATLAVGICSPAAHGISLLRGRFGQDC |
| | TVALQRLTYLVHGDVLCTNLTLPLLPSRNADETFFGVQWICP (SEQ ID |
| | NO: 116) |
| Human | >NM_001244.4 Homo sapiens TNF superfamily member 8 |
| CD30L | (TNFSF8), transcript variant 1, mRNA |
| (CD153) | GTCATTTTCCTACGCGCCCTCTGACATCAGCCACCTTCTCTGTAGCTAGTT |
| | TCTCTGCACACAACTTAATCCCTGGCAATGAAAAATGAACCTCTCCCCCAC |
| | CCTTGCTGCCGCCTCTCGCCTCACGCCCCCAGAGAAGAGTTTCTCCACCAG |
| | GCAGCAGGTGAAGGTTTTTTTCCAAGTCACATGATTCAGGATTCAGGGGGA |
| | GAATCCTTCTTGGAACAGAGATGGGCCCAGAACTGAATCAGATGAAGAGAG |
| | ATAAGGTGTGATGTGGGGAAGACTATATAAAGAATGGACCCAGGGCTGCAG |
| | CAAGCACTCAACGGAATGGCCCCTCCTGGAGACACAGCCATGCATGTGCCG |
| | GCGGGCTCCGTGGCCAGCCACCTGGGGACCACGAGCCGCAGCTATTTCTAT |
| | TTGACCACAGCCACTCTGGCTCTGTGCCTTGTCTTCACGGTGGCCACTATT |
| | ATGGTGTTGGTCGTTCAGAGGACGGACTCCATTCCCAACTCACCTGACAAC |
| | GTCCCCCTCAAAGGAGGAAATTGCTCAGAAGACCTCTTATGTATCCTGAAA |
| | AGGGCTCCATTCAAGAAGTCATGGGCCTACCTCCAAGTGGCAAAGCATCTA |
| | AACAAAACCAAGTTGTCTTGGAACAAAGATGGCATTCTCCATGGAGTCAGA |
| | TATCAGGATGGGAATCTGGTGATCCAATTCCCTGGTTTGTACTTCATCATT |
| | TGCCAACTGCAGTTTCTTGTACAATGCCCAAATAATTCTGTCGATCTGAAG |
| | TTGGAGCTTCTCATCAACAAGCATATCAAAAAACAGGCCCTGGTGACAGTG |
| | TGTGAGTCTGGAATGCAAACGAAACACGTATACCAGAATCTCTCTCAATTC |
| | TTGCTGGATTACCTGCAGGTCAACACCACCATATCAGTCAATGTGGATACA |
| | TTCCAGTACATAGATACAAGCACCTTTCCTCTTGAGAATGTGTTGTCCATC |
| | TTCTTATACAGTAATTCAGACTGAACAGTTTCTCTTGGCCTTCAGGAAGAA |
| | AGCGCCTCTCTACCATACAGTATTTCATCCCTCCAAACACTTGGGCAAAAA |
| | GAAAACTTTAGACCAAGACAAACTACACAGGGTATTAAATAGTATACTTCT |
| | CCTTCTGTCTCTTGGAAAGATACAGCTCCAGGGTTAAAAAGAGAGTTTTTA |
| | GTGAAGTATCTTTCAGATAGCAGGCAGGGAAGCAATGTAGTGTGGTGGGCA |
| | GAGCCCCACACAGAATCAGAAGGGATGAATGGATGTCCCAGCCCAACCTCT |
| | AATTCACTGTATGGTCTTGATCTATTTCTTCTGTTTTGAGAGCCTCCAGTT |
| | AAAATGGGGCTCCAGTACCAGAGCAGCTAGCAACTCTGCCCTAATGGGAAA |
| | TGAAGGGGAGCTGGGTGTGAGTGTTTACACTGTGCCCTTCACGGGATACTT |
| | CTTTTATCTGCAGATGGCCTAATACTTAGTTGTCCAAGTCGCGATCAAGGA |
| | CTCTCTCACACAGGAAACTTCCCTATACTGGCAGATACACTTGTGACTGAA |
| | CCATGCCCAGTTTATGCCTGTCTGACTGTCACTCTGGCACTAGGAGGCTGA |
| | TCTTGTACTCCATATGACCCCACCCCTAGGAACCCCCAGGGAAAACCAGGC |
| | TGGGACAGCCCCCTGTTCCTGAGATGGAAAGCACAAATTTAATACACCACC |
| | ACAATGGAAAACAAGTTCAAAGACTTTTACTTACAGATCCTGGACAGAAAG |
| | GGCATAATGAGTCTGAAGGGCAGTCCTCCTTCTCTAGGTTACATGAGGCAG |
| | GAATAAGAAGTCAGACAGAGACAGCAAGACAGTTAACAATGTAGGTAAAGA |
| | AATAGGGTGTGGTCACTCTCAATTCACTGGCAAATGCCTGAATGGTCTGTC |
| | TGAAGGAAGCAACAGAGAAGTGGGGAATCCAGTCTGCTAGGCAGGAAAGAT |
| | GCCTCTAAGTTCTTGTCTCTGGCCAGAGGTGTGGTATAGAACCAGAAACCC |
| | ATATCAAGGGTGACTAAGCCCGGCTTCTGGTATGAGAAATTAAACTTGTAT |
| | ACAAAATGGTTGCCAAGGCAACATAAAATTATAAGAATTCACTATACCTTC |
| | CCCTCCCTGGAACTCAGGATCCAAGTCTAGAAAATGAAAGGACTGGGTTTG |
| | AATTGCTTCAAAACCTCTTCCATCTCAGAAGACCAGACCCTGGGAACTGAG |
| | ATTCCAGACACAATTTTGGAAGCTCTCCAACCAAAATAAGGCCCCCCTACC |
| | CCAGTATATAATTGAAGACACTAGTAACACCTGACTGCATCTCATCTCAGC |
| | AGAGCCAGAATATGGGGACAAGGTTCAGGGTGCCCTGCTGAATGGTGTGAA |
| | CAGCAGGATCTCAAGGATGTAATGGAAAGAACTACCACACTGACCATCCAG |
| | AATCTAAGAGACCATCTGGGTGTTTGGGAAACCATCTGACGAGGCCTGACT |
| | CTATTCCAGTTAGATTGACAATAATTGAGCAGCAGGCATTTTTCATTTCTG |
| | GTCAGGAAAGCATTGTGCCTTTAGCAAACAATCAGTGTGCAACAGTGATGT |
| | GGTCATCTAGCCAGGGAATGGCTGCTCCATCCCCTGCATAATATATTCCTG |
| | CTTCAAACACCTCTCAGAAAACCAGTTCCGCGAGGGTTTTTATATCCCCAC |
| | AAAGTTGTTGAGAGACAATGATGACCCTGGAAGTGGGGAGGAGGACTTCTG |
| | AGAAACAGCAACCTCTCTCCTGATTGGGGTAGCCATGAGATTTCTCTAGCT |
| | ATATCCAACTTGGCATCTGTACATCATCTTTGGAGGAACATCTTATTTGTG |
| | GAAGGACCTTGACAAGCCGTTTGAGATGGAATGTAGGCCCTGATGTTATGC |
| | TTCAGTAAAAAAAGATGGAAGCTTCCCTGCTATACCAAAACATGGAGCAAA |
| | ATTTGCATTTTTCTCAAGAAGGAGAGAAAAGGAGTAGGACTCCAGCAAAGT |
| | TTGTCAGAAGGAAAGCTAGAAAAGATTTAAAAGAAAAAAAGAAAGAACAAA |
| | TCAGCAGTGGTGGTATGGATGAAAGGGACTTGAGAGAACAAAAATGGCTAA |
| | GGGAAAATTTTAAGTCATCTGCTGAGCAGTGTGCTGTGTCAACCTCCTCCT |
| | AGGTCTCCTCTATGAAATATTTAGTAAAGTCTACATTTCTCTTTAACTCTT |
| | TCTGTGAGTAGATTCTTTGGGAGAAGCAGGCATTGGAAGAGGTGTTGAATT |
| | CAGCAAGCCAAATGGTCTGTGGTAAAAAACAAAACAGACTTTGAGACTCAA |
| | GGCTAAAAAAACAGGGAAATGGCTGGCATTTGAGTCACACACTAACTGCAT |
| | AGGACAAATGAATCTTGCTTAAACCAACTCATGCATTCTTGAAAAGGTATA |
| | TGCAACCCAACTGTGTGTTAACTAAGCAATTTTTTTGCCATCTCACATTCT |
| | AACTCGAGAAAGATTCCATTTTCATTTTTCACCAACTGTTCTCTGAGCAGA |
| | GGTACCTGACTTTTGCACTGTGAGTGGTTTCTAATCTCAGTCTCTGTCAAG |
| | CAATGCTAAGAAAGCCAACACCTAAAGACACAAGGGGTACATCATTTAAAT |
| | GAATAATGTAACCAAACAAACAAAAAAAGAGAATAATCATTAATAACTCAA |
| | CTGATAGATATGTAGGGAGTAGGCAACCCAGGAAGTTTAAAACTAAATTCT |
| | GTTACTCTTGAGGGTTAACCAGCCCCTGGGAATGTTATGAGCAAATGATAC |
| | TCCATGAGTAAAATGATATCTATGCAAGTAAAATAAATAATTTATCTAACT |
| | GGGAA (SEQ ID NO: 117) |
| | >NP_001235.1 tumor necrosis factor ligand superfamily |
| | member 8 isoform 1 [Homo sapiens] |
| | MDPGLQQALNGMAPPGDTAMHVPAGSVASHLGTTSRSYFYLTTATLALCLV |
| | FTVATIMVLVVQRTDSIPNSPDNVPLKGGNCSEDLLCILKRAPFKKSWAYL |
| | QVAKHLNKTKLSWNKDGILHGVRYQDGNLVIQFPGLYFIICQLQFLVQCPN |
| | NSVDLKLELLINKHIKKQALVTVCESGMQTKHVYQNLSQFLLDYLQVNTTI |
| | SVNVDTFQYIDTSTFPLENVLSIFLYSNSD (SEQ ID NO: 118) |
| Mouse CD30L | >NM_009403.3 Mus musculus tumor necrosis factor |
| (CD153) | (ligand) superfamily, member 8 (Tnfsf8), mRNA |
| | AGATTAATCCCAGGCGATGAAAAATGAACCTCTCCCCCACCCTTGCAGCCA |
| | CCCTTCGCCTCACGCCCCCAGAGAAGAGTTTCTCCATCCGGCAACTGGTGA |
| | AGGCTTTTTTCCAAGTCACATGATCCAGGATGCAGGGGAAAATCCTTCTTG |
| | GAACAGAGCTGGGTACAGAACCGAATCAGATGAGGAGAGATAAGGTGTGAT |
| | GTGGGACAGACTATATAAAGCATGGAGCCAGGGCTGCAACAAGCAGGCAGC |
| | TGTGGGGCTCCTTCCCCTGACCCAGCCATGCAGGTGCAGCCCGGCTCGGTA |
| | GCCAGCCCCTGGAGAAGCACGAGGCCCTGGAGAAGCACAAGTCGCAGCTAC |
| | TTCTACCTCAGCACCACCGCACTGGTGTGCCTTGTTGTGGCAGTGGCGATC |
| | ATTCTGGTACTGGTAGTCCAGAAAAAGGACTCCACTCCAAATACAACTGAG |
| | AAGGCCCCCCTTAAAGGAGGAAATTGCTCAGAGGATCTCTTCTGTACCCTG |
| | AAAAGTACTCCATCCAAGAAGTCATGGGCCTACCTCCAAGTGTCAAAGCAT |
| | CTCAACAATACCAAACTGTCATGGAACGAAGATGGCACCATCCACGGACTC |
| | ATATACCAGGACGGGAACCTGATAGTCCAATTCCCTGGCTTGTACTTCATC |
| | GTTTGCCAACTGCAGTTCCTCGTGCAGTGCTCAAATCATTCTGTGGACCTG |
| | ACATTGCAGCTCCTCATCAATTCCAAGATCAAAAAGCAGACGTTGGTAACA |
| | GTGTGTGAGTCTGGAGTTCAGAGTAAGAACATCTACCAGAATCTCTCTCAG |
| | TTTTTGCTGCATTACTTACAGGTCAACTCTACCATATCAGTCAGGGTGGAT |
| | AATTTCCAGTATGTGGATACAAACACTTTCCCTCTTGATAATGTGCTATCC |
| | GTCTTCTTATATAGTAGCTCAGACTGAATAGTTGTTCTTAACCTTTATGAA |
| | AATGCTGTCTACCATACAGTACTTCATCTGTCCAAACATGGGCCAAAGAAA |
| | ATATTAGGACAACTCAAACTAAGCATGTGAGTTAGTGCACTTCTCTTTCTG |
| | TCCTTTGGAAAAATACAAACCCAGGATTTAGAAAGTGGAGTCTCCTTCAGA |
| | TGCACAAACAGGAAAGAATGTGATATGTGCACAGAGACCTACTTGGGCACT |
| | AGAAGGGGTTGAGTTGTCCCAGTATAACCACTAATTCACTGACCTTGAGCC |
| | ATTTTTCCTTCCCCTGGAACTTGGGGTCTGAATCTGGAAAAGTAGGAGATG |
| | AGATTTACATTTCCCCAATATTTTCTTCAACTCAGAAGACGAGACTGTGGA |
| | GCTGAGCTCCCTACACAGATGAAGGCCTCCCATGGCATGAGGAAAATGATG |
| | GTACCAGTAATGTCTGTCTGACTGTCATCTCAGCAAGTCCTAAGGACTTCC |
| | ATGCTGCCTTGTTGAAAGATACTCTAACCTCTTGTAATGGGCAAAGTGATC |
| | CTGTCTCTCACTGAGGGGAGTAGCTGCTGCCATCTCCTGAGACATACATGG |
| | AGACATTTTCTGCCCAAATTCCATTCTGTGTGCAGTTTTTAAGTATTCCCC |
| | CAAAAGTTCTTGACAATGAGAACTTTGAATGTGGGAAGAGCTTCTGGACAG |
| | CAAACATTAACAGCTTCTCCTGACCAGAGAGACCATGCAAGCTTGGTCTTA |
| | GACCCATCAAGCTTGAGGTTTCTACATTGTGGGAGACAGACTTTTGACAAA |
| | CCATTTGAGTTGATGTCTGGGCCCCTGGGAGTTCTCCTTCAGTAAGGAGAG |
| | CAAGCCGTTCTAGTGCTGTGTCAGAGGATGGAGTAAAATAGACACTTTTCT |
| | GAAGGAAAGGAGAACAAAGTTCCAGAAAAAGGCTAGAAAATGTTTAAAAGG |
| | AAAAGAAAAAACTCAGCTTTTCTCATATGAGAGGAACCCAGAAAAACAACA |
| | CTGAAAAAGAAGAGTGGCTCTGTCAACCTCCTCTTAGGTCTCCTCCTCTCT |
| | AGTTATTGGGAAAGGAGTTGCATGGTACAGGACAAGTTCTGGTGTGTGGTC |
| | AAATAGAATCAGATGTGGAGAACACCATGCAGAGAATAAGGAGACCTGTCA |
| | TATTTGTGTTGTACTCAAATGAGGGGCAAATGAATCTTAGGCTAAATCAAA |
| | TAACAGTCTCTGTCAAGCTGTGCTCAGAAAGTCAACCACTGAAGATGGAGG |
| | GTGAGGCACGTCATTTAAAAAAAGTGAAATGTAGC (SEQ ID NO: 119) |
| | >NP_033429.1 tumor necrosis factor ligand superfamily |
| | member 8 [Mus musculus] |
| | MEPGLQQAGSCGAPSPDPAMQVQPGSVASPWRSTRPWRSTSRSYFYLSTTA |
| | LVCLVVAVAIILVLVVQKKDSTPNTTEKAPLKGGNCSEDLFCTLKSTPSKK |
| | SWAYLQVSKHLNNTKLSWNEDGTIHGLIYQDGNLIVQFPGLYFIVCQLQFL |
| | VQCSNHSVDLTLQLLINSKIKKQTLVTVCESGVQSKNIYQNLSQFLLHYLQ |
| | VNSTISVRVDNFQYVDTNTFPLDNVLSVFLYSSSD (SEQ ID NO: 120) |
| Human | >NM_005092.4 Homo sapiens TNF superfamily member 18 |
| GITRL | (TNFSF18), mRNA |
| | ATCACTTGTGAATTTTTGTTTTCCACAGCTCTCATTTCTCCAAAAATGTGT |
| | TTGAGCCACTTGGAAAATATGCCTTTAAGCCATTCAAGAACTCAAGGAGCT |
| | CAGAGATCATCCTGGAAGCTGTGGCTCTTTTGCTCAATAGTTATGTTGCTA |
| | TTTCTTTGCTCCTTCAGTTGGCTAATCTTTATTTTTCTCCAATTAGAGACT |
| | GCTAAGGAGCCCTGTATGGCTAAGTTTGGACCATTACCCTCAAAATGGCAA |
| | ATGGCATCTTCTGAACCTCCTTGCGTGAATAAGGTGTCTGACTGGAAGCTG |
| | GAGATACTTCAGAATGGCTTATATTTAATTTATGGCCAAGTGGCTCCCAAT |
| | GCAAACTACAATGATGTAGCTCCTTTTGAGGTGCGGCTGTATAAAAACAAA |
| | GACATGATACAAACTCTAACAAACAAATCTAAAATCCAAAATGTAGGAGGG |
| | ACTTATGAATTGCATGTTGGGGACACCATAGACTTGATATTCAACTCTGAG |
| | CATCAGGTTCTAAAAAATAATACATACTGGGGTATCATTTTACTAGCAAAT |
| | CCCCAATTCATCTCCTAGAGACTTGATTTGATCTCCTCATTCCCTTCAGCA |
| | CATGTAGAGGTGCCAGTGGGTGGATTGGAGGGAGAAGATATTCAATTTCTA |
| | GAGTTTGTCTGTCTACAAAAATCAACACAAACAGAACTCCTCTGCACGTGA |
| | ATTTTCATCTATCATGCCTATCTGAAAGAGACTCAGGGGAAGAGCCAAAGA |
| | CTTTTGGTTGGATCTGCAGAGATACTTCATTAATCCATGATAAAACAAATA |
| | TGGATGACAGAGGACATGTGCTTTTCAAAGAATCTTTATCTAATTCTTGAA |
| | TTCATGAGTGGAAAAATGGAGTTCTATTCCCATGGAAGATTTACCTGGTAT |
| | GCAAAAAGGATCTGGGGCAGTAGCCTGGCTTTGTTCTCATATTCTTGGGCT |
| | GCTGTAATTCATTCTTCTCATACTCCCATCTTCTGAGACCCTCCCAATAAA |
| | AAGTAGACTGATAGGATGGCCACAGATATGCCTACCATACCCTACTTTAGA |
| | TATGGTGGTGTTAGAAGATAAAGAACAATCTGAGAACTATTGGAATAGAGG |
| | TACAAGTGGCATAAAATGGAATGTACGCTATCTGGAAATTTCTCTTGGTTT |
| | TATCTTCCTCAGGATGCAGGGTGCTTTAAAAAGCCTTATCAAAGGAGTCAT |
| | TCCGAACCCTCACGTAGAGCTTTGTGAGACCTTACTGTTGGTGTGTGTGTC |
| | TAAACATTGCTAATTGTAAAGAAAGAGTAACCATTAGTAATCATTAGGTTT |
| | AACCCCAGAATGGTATTATCATTACTGGATTATGTCATGTAATGATTTAGT |
| | ATTTTTAGCTAGCTTTCCACAGTTTGCAAAGTGCTTTCGTAAAACAGTTAG |
| | CAATTCTATGAAGTTAATTGGGCAGGCATTTGGGGGAAAATTTTAGTGATG |
| | AGAATGTGATAGCATAGCATAGCCAACTTTCCTCAACTCATAGGACAAGTG |
| | ACTACAAGAGGCAATGGGTAGTCCCCTGCATTGCACTGTCTCAGCTTTAGA |
| | ATTGTTATTTCTGCTATCGTGTTATAAGACTCTAAAACTTAGCGAATTCAC |
| | TTTTCAGGAAGCATATTCCCCTTTAGCCCAAGGTGAGCAGAGTGAAGCTAC |
| | AACAGATCTTTCCTTTACCAGCACACTTTTTTTTTTTTTCCTGCCTGAATC |
| | AGGGAGATCCAGGATGCTGTTCAGGCCTTATCCCAACCAAATTCCCCTCTT |
| | CACTTTGCAGGGCCCATCTTAGTCAAATGTGCTAACTTCTAAAATAATAAA |
| | TAGCACTAATTCAAAATTTTTGGACTCTTAAATTAGCTACTTGCAGGTTCT |
| | TGTTGAAAGGTATATAATATTACATTGTAAACAAATTTAAAATATTTATGG |
| | ATATTTGTGAAAAGCTGCATTATGTTAAATAATATTACATGTAAAGCTATT |
| | TAAAAGAGGTTTTTTTTGTATTTTGTTTAACAAAAATTGCTCAGGAGCATG |
| | CTAAGCCTGAGGCCAAGTTGTTTCTTAGTATGACTTTTTAAAAAAACATCT |
| | GCTGAGTAGCTACAGGGCCAAAGACTTGGAGAGCTTGTTTCTGTTGCATTT |
| | GCATATCTTCTCAGGAAATTAAAGTGTGTCATACATATGTGTGTGTGTGTG |
| | TGTGTGTGTGTGTATATGTGTGTGTGTATATATATGTATACTTATAAAATC |
| | TTGGTGTTCTTGATCTTTGTTGTGTTATAAGCAATGTGTGCTGGAGTGGGC |
| | TGGTGCTAGCTTATAAGCACATATTATTAAATTTTCAGGAATGTTGCACTT |
| | TAGTTATTAACTATAGGCATTCTTGAAATTGGCTATGGTGGGAGTATTTAT |
| | ACCATGTAAATTGGCAAACACTACACATTTTCCTTTTGGACAGCTAGTTCA |
| | CCAGCACACCACTGTGAAACTCTCCTTAATGACTCCTCTCTGCCCCCGCTT |
| | CATTCCTGGGATAATCATAGCAGACTAAGGGAGAAAATGAAATTGTAAAAA |
| | TTTGGCATACTGGTGATTTCTCAGGGCAAGCAGAGGTTACTACAGCTGCAG |
| | CTAGAGGGATGACTACCAACAGGTGACCTTTACATTTTCCTGATGTTATAA |
| | TTTTAGCTTTTGTTTTCAATGTATACTGTTTTCCTGTTTCTCCACATAGTA |
| | GTCTGCATTTTAAATCTATAATAAAACATGCTGATAACTGG (SEQ ID NO: |
| | 121) |
| | >NP_005083.3 tumor necrosis factor ligand superfamily |
| | member 18 [Homo sapiens] |
| | MCLSHLENMPLSHSRTQGAQRSSWKLWLFCSIVMLLFLCSFSWLIFIFLQL |
| | ETAKEPCMAKFGPLPSKWQMASSEPPCVNKVSDWKLEILQNGLYLIYGQVA |
| | PNANYNDVAPFEVRLYKNKDMIQTLTNKSKIQNVGGTYELHVGDTIDLIFN |
| | SEHQVLKNNTYWGIILLANPQFIS (SEQ ID NO: 122) |
| Mouse GITRL | >NM_183391.3 Mus musculus tumor necrosis factor |
| | (ligand) superfamily, member 18 (Tnfsf18), mRNA |
| | TTGTGGGTATCTGCTTTCCCCAGTTCTCATTCCATCAGAGAACGAGTTCTA |
| | GCCTCATGGAGGAAATGCCTTTGAGAGAATCAAGTCCTCAAAGGGCAGAGA |
| | GGTGCAAGAAGTCATGGCTCTTGTGCATAGTGGCTCTGTTACTGATGTTGC |
| | TCTGTTCTTTGGGTACACTGATCTATACTTCACTCAAGCCAACTGCCATCG |
| | AGTCCTGCATGGTTAAGTTTGAACTATCATCCTCAAAATGGCACATGACAT |
| | CTCCCAAACCTCACTGTGTGAATACGACATCTGATGGGAAGCTGAAGATAC |
| | TGCAGAGTGGCACATATTTAATCTACGGCCAAGTGATTCCTGTGGATAAGA |
| | AATACATAAAAGACAATGCCCCCTTCGTAGTACAGATATATAAAAAGAATG |
| | ATGTCCTACAAACTCTAATGAATGATTTTCAAATCTTGCCTATAGGAGGGG |
| | TTTATGAACTGCATGCTGGAGATAACATATATCTGAAGTTCAACTCTAAAG |
| | ACCATATTCAGAAAACTAACACATACTGGGGGATCATCTTAATGCCTGATC |
| | TACCATTCATCTCTTAGAGATTGGGTTTGGTCTCCTCATCTTCTTCTTTGT |
| | ATCCCGAGATGCTGGTGGGTGGGTTGGAGGGGGATGATTGATGGCAATGCA |
| | CACAGTTTGTGAGGGCTTACAAATTGACACAATCAGAGCCTCTTGGCATAT |
| | AAAATTTTAGCCCTCATATCTGTCTGAAGAGGACTCAGCAAATGGGCCAAT |
| | CCCTAATGTTGGGTCTGCAAATGGACTTGTACAATCCATGATAAAAAGGAG |
| | TATGGGCCACAGAAGACAGAAACTCTTCCAAAGAATGTCTTTCTAACCTTG |
| | ATCCCTGGGTAGAATGAGATCCTGTTTCCATGGGAGTCTTACTTGGCTTGC |
| | AAAAAAGGGTGTAGGGCAGTAGCTTGGCCTTTTTTCCATCATAATTTCCTT |
| | GAGCTGTTTTACCTTAATCCCTCCAAACTCTCACCTTCTGAGAGCCTCCTA |
| | ATGAAACATTGTTAGACTGGTGGGGTGGCCAAGACATGCCAACAACACCCT |
| | TCTTTAGAGGTGGTGTTTTTAGAGGACAGAGAACATTATGAAGCCTAGAGC |
| | AGCAGAGGTCAAGATGCCACGAAATGGAATTGATCTGGGAATTTTTTTTTT |
| | TTTTCATTCTCAGGATGCAGGTTCATTCTGAACTTTCCCCTAGGCCTTCAT |
| | TGCTTTTGTGTGTATGTGTGCATAAATTCTGCAAATAGAAAAATGAGAGTT |
| | TGCACCAGTACTCACTAGATTTAACACCAGAAAGTGGTACTTTTCTGGCTG |
| | TATTATGCCATGATAGCACATTTTCTGTTGGTGTTCCCTAACTGACAAGTA |
| | TAACAGTTTTCCTAAACCACACAACAATGCTATGATGTTAATGGGGTAGAT |
| | ATTTTTGGAAAAAAATTGCACAGTGAGAACATGGGTAGATGAACCCTAAGA |
| | CTCTTACCTCAATTCAGAACTCGCAAGGAGTTAAGTGAGTGGGGTCTTCAT |
| | TAGACCATTCACATGGTCTCTGCTTTGAAACTGGCGTTGCTACTGTCTCAT |
| | TATACATCACTAAAATGGAATTAACTCAACTTTGAAATGGATGCATCGACT |
| | TTACCCCAAGGTGTCCAGAATGAAGCTACAAGACTTTTACCAGCAGTCATT |
| | TTCCTTTTGCCTGGAGCAAGAAGATCCAGGATACTGTTGGAAGAGTTCATC |
| | TCACTCAACCATGCTGACTTTCCAAAGTAATAATGAACATTTGTGTTCAAA |
| | TTTTGGATTCTGTTAAATTTAGCCAGCTTGTGAGTTCTTGTCGAAAAGTAT |
| | TTTAAACCAATTTACACTATTTATGGGTATTTGTGAAAAGCTATATAGTGA |
| | TATTTTATATATAACTAATTTAAAATATTTTTATTTTATGTAACAAAAATA |
| | CTATAGGCTAAGCTATTTCTTCTTATTTTTTTATGAATACTTGCTGAATTG |
| | CCATAGGGCACAAAGACTCTTCTGTTTGCATATCTTCTCAGGAAATTAAAA |
| | TTGTATCACATGTATTTATAAGAA (SEQ ID NO: 123) |
| | >NP_899247.3 tumor necrosis factor ligand superfamily |
| | member 18 [Mus musculus] |
| | MEEMPLRESSPQRAERCKKSWLLCIVALLLMLLCSLGTLIYTSLKPTAIES |
| | CMVKFELSSSKWHMTSPKPHCVNTTSDGKLKILQSGTYLIYGQVIPVDKKY |
| | IKDNAPFVVQIYKKNDVLQTLMNDFQILPIGGVYELHAGDNIYLKFNSKDH |
| | IQKTNTYWGIILMPDLPFIS (SEQ ID NO: 124) |
| Human | >NM_000074.3 Homo sapiens CD40 ligand (CD40LG), mRNA |
| CD40L | AATCCTGAGTAAGGTGGCCACTTTGACAGTCTTCTCATGCTGCCTCTGCCA |
| (CD154) | CCTTCTCTGCCAGAAGATACCATTTCAACTTTAACACAGCATGATCGAAAC |
| | ATACAACCAAACTTCTCCCCGATCTGCGGCCACTGGACTGCCCATCAGCAT |
| | GAAAATTTTTATGTATTTACTTACTGTTTTTCTTATCACCCAGATGATTGG |
| | GTCAGCACTTTTTGCTGTGTATCTTCATAGAAGGTTGGACAAGATAGAAGA |
| | TGAAAGGAATCTTCATGAAGATTTTGTATTCATGAAAACGATACAGAGATG |
| | CAACACAGGAGAAAGATCCTTATCCTTACTGAACTGTGAGGAGATTAAAAG |
| | CCAGTTTGAAGGCTTTGTGAAGGATATAATGTTAAACAAAGAGGAGACGAA |
| | GAAAGAAAACAGCTTTGAAATGCAAAAAGGTGATCAGAATCCTCAAATTGC |
| | GGCACATGTCATAAGTGAGGCCAGCAGTAAAACAACATCTGTGTTACAGTG |
| | GGCTGAAAAAGGATACTACACCATGAGCAACAACTTGGTAACCCTGGAAAA |
| | TGGGAAACAGCTGACCGTTAAAAGACAAGGACTCTATTATATCTATGCCCA |
| | AGTCACCTTCTGTTCCAATCGGGAAGCTTCGAGTCAAGCTCCATTTATAGC |
| | CAGCCTCTGCCTAAAGTCCCCCGGTAGATTCGAGAGAATCTTACTCAGAGC |
| | TGCAAATACCCACAGTTCCGCCAAACCTTGCGGGCAACAATCCATTCACTT |
| | GGGAGGAGTATTTGAATTGCAACCAGGTGCTTCGGTGTTTGTCAATGTGAC |
| | TGATCCAAGCCAAGTGAGCCATGGCACTGGCTTCACGTCCTTTGGCTTACT |
| | CAAACTCTGAACAGTGTCACCTTGCAGGCTGTGGTGGAGCTGACGCTGGGA |
| | GTCTTCATAATACAGCACAGCGGTTAAGCCCACCCCCTGTTAACTGCCTAT |
| | TTATAACCCTAGGATCCTCCTTATGGAGAACTATTTATTATACACTCCAAG |
| | GCATGTAGAACTGTAATAAGTGAATTACAGGTCACATGAAACCAAAACGGG |
| | CCCTGCTCCATAAGAGCTTATATATCTGAAGCAGCAACCCCACTGATGCAG |
| | ACATCCAGAGAGTCCTATGAAAAGACAAGGCCATTATGCACAGGTTGAATT |
| | CTGAGTAAACAGCAGATAACTTGCCAAGTTCAGTTTTGTTTCTTTGCGTGC |
| | AGTGTCTTTCCATGGATAATGCATTTGATTTATCAGTGAAGATGCAGAAGG |
| | GAAATGGGGAGCCTCAGCTCACATTCAGTTATGGTTGACTCTGGGTTCCTA |
| | TGGCCTTGTTGGAGGGGGCCAGGCTCTAGAACGTCTAACACAGTGGAGAAC |
| | CGAAACCCCCCCCCCCCCCCCGCCACCCTCTCGGACAGTTATTCATTCTCT |
| | TTCAATCTCTCTCTCTCCATCTCTCTCTTTCAGTCTCTCTCTCTCAACCTC |
| | TTTCTTCCAATCTCTCTTTCTCAATCTCTCTGTTTCCCTTTGTCAGTCTCT |
| | TCCCTCCCCCAGTCTCTCTTCTCAATCCCCCTTTCTAACACACACACACAC |
| | ACACACACACACACACACACACACACACACACACACACAGAGTCAGGCCGT |
| | TGCTAGTCAGTTCTCTTCTTTCCACCCTGTCCCTATCTCTACCACTATAGA |
| | TGAGGGTGAGGAGTAGGGAGTGCAGCCCTGAGCCTGCCCACTCCTCATTAC |
| | GAAATGACTGTATTTAAAGGAAATCTATTGTATCTACCTGCAGTCTCCATT |
| | GTTTCCAGAGTGAACTTGTAATTATCTTGTTATTTATTTTTTGAATAATAA |
| | AGACCTCTTAACATTA (SEQ ID NO: 125) |
| | >NP_000065.1 CD40 ligand [Homo sapiens] |
| | MIETYNQTSPRSAATGLPISMKIFMYLLTVFLITQMIGSALFAVYLHRRLD |
| | KIEDERNLHEDFVFMKTIQRCNTGERSLSLLNCEEIKSQFEGFVKDIMLNK |
| | EETKKENSFEMQKGDQNPQIAAHVISEASSKTTSVLQWAEKGYYTMSNNLV |
| | TLENGKQLTVKRQGLYYIYAQVTFCSNREASSQAPFIASLCLKSPGRFERI |
| | LLRAANTHSSAKPCGQQSIHLGGVFELQPGASVFVNVTDPSQVSHGTGFTS |
| | FGLLKL (SEQ ID NO: 126) |
| Mouse CD40L | >NM_011616.2 Mus musculus CD40 ligand (Cd40lg), mRNA |
| | CTTTCAGTCAGCATGATAGAAACATACAGCCAACCTTCCCCCAGATCCGTG |
| | GCAACTGGACTTCCAGCGAGCATGAAGATTTTTATGTATTTACTTACTGTT |
| | TTCCTTATCACCCAAATGATTGGATCTGTGCTTTTTGCTGTGTATCTTCAT |
| | AGAAGATTGGATAAGGTCGAAGAGGAAGTAAACCTTCATGAAGATTTTGTA |
| | TTCATAAAAAAGCTAAAGAGATGCAACAAAGGAGAAGGATCTTTATCCTTG |
| | CTGAACTGTGAGGAGATGAGAAGGCAATTTGAAGACCTTGTCAAGGATATA |
| | ACGTTAAACAAAGAAGAGAAAAAAGAAAACAGCTTTGAAATGCAAAGAGGT |
| | GATGAGGATCCTCAAATTGCAGCACACGTTGTAAGCGAAGCCAACAGTAAT |
| | GCAGCATCCGTTCTACAGTGGGCCAAGAAAGGATATTATACCATGAAAAGC |
| | AACTTGGTAATGCTTGAAAATGGGAAACAGCTGACGGTTAAAAGAGAAGGA |
| | CTCTATTATGTCTACACTCAAGTCACCTTCTGCTCTAATCGGGAGCCTTCG |
| | AGTCAACGCCCATTCATCGTCGGCCTCTGGCTGAAGCCCAGCAGTGGATCT |
| | GAGAGAATCTTACTCAAGGCGGCAAATACCCACAGTTCCTCCCAGCTTTGC |
| | GAGCAGCAGTCTGTTCACTTGGGCGGAGTGTTTGAATTACAAGCTGGTGCT |
| | TCTGTGTTTGTCAACGTGACTGAAGCAAGCCAAGTGATCCACAGAGTTGGC |
| | TTCTCATCTTTTGGCTTACTCAAACTCTGAACAGTGCGCTGTCCTAGGCTG |
| | CAGCAGGGCTGATGCTGGCAGTCTTCCCTATACAGCAAGTCAGTTAGGACC |
| | TGCCCTGTGTTGAACTGCCTATTTATAACCCTAGGATCCTCCTCATGGAGA |
| | ACTATTTATTATGTACCCCCAAGGCACATAGAGCTGGAATAAGAGAATTAC |
| | AGGGCAGGCAAAAATCCCAAGGGACCCTGCTCCCTAAGAACTTACAATCTG |
| | AAACAGCAACCCCACTGATTCAGACAACCAGAAAAGACAAAGCCATAATAC |
| | ACAGATGACAGAGCTCTGATGAAACAACAGATAACTAATGAGCACAGTTTT |
| | GTTGTTTTATGGGTGTGTCGTTCAATGGACAGTGTACTTGACTTACCAGGG |
| | AAGATGCAGAAGGGCAACTGTGAGCCTCAGCTCACAATCTGTTATGGTTGA |
| | CCTGGGCTCCCTGCGGCCCTAGTAGG (SEQ ID NO: 127) |
| | >NP_035746.2 CD40 ligand [Mus musculus] |
| | MIETYSQPSPRSVATGLPASMKIFMYLLTVFLITQMIGSVLFAVYLHRRLD |
| | KVEEEVNLHEDFVFIKKLKRCNKGEGSLSLLNCEEMRRQFEDLVKDITLNK |
| | EEKKENSFEMQRGDEDPQIAAHVVSEANSNAASVLQWAKKGYYTMKSNLVM |
| | LENGKQLTVKREGLYYVYTQVTFCSNREPSSQRPFIVGLWLKPSSGSERIL |
| | LKAANTHSSSQLCEQQSVHLGGVFELQAGASVFVNVTEASQVIHRVGFSSF |
| | GLLKL (SEQ ID NO: 128) |
| Human | >NM_003807.5 Homo sapiens TNF superfamily member 14 |
| LIGHT | (TNFSF14), transcript variant 1, mRNA |
| (CD258) | CGAGACTCCATCTCAAAAACAAAACAAATAAACGAACAAAAAAACCCACAA |
| | CGTATTATTTTCTTGTTTACGAGGTTTCTTGTCTCTCTGGCTCCACCAGAA |
| | GAGGAGCAGGGACCCTTCTTGCTGTTGTTCATTGCTGCATCCCCCACACCG |
| | AGAGCAGAGCCTGGCATGGGCAGAAAGTCCTCAGTCGATATTTGGTGGCCC |
| | CAAGCGAATGAAGCATCCAAGAAGGGAAAGCTGGGGGCTCCCCACTGCACT |
| | TGCCACCTGAGTCACATTTTCAGAAGCCTCTGGAAAGTCGTGCACAGCCCA |
| | GGAGTGTTGAGCAATTTCGGTTTCCTCTGAGGTTGAAGGACCCAGGCGTGT |
| | CAGCCCTGCTCCAGACACCTTGGGCATGGAGGAGAGTGTCGTACGGCCCTC |
| | AGTGTTTGTGGTGGATGGACAGACCGACATCCCATTCACGAGGCTGGGACG |
| | AAGCCACCGGAGACAGTCGTGCAGTGTGGCCCGGGTGGGTCTGGGTCTCTT |
| | GCTGTTGCTGATGGGGGCCGGGCTGGCCGTCCAAGGCTGGTTCCTCCTGCA |
| | GCTGCACTGGCGTCTAGGAGAGATGGTCACCCGCCTGCCTGACGGACCTGC |
| | AGGCTCCTGGGAGCAGCTGATACAAGAGCGAAGGTCTCACGAGGTCAACCC |
| | AGCAGCGCATCTCACAGGGGCCAACTCCAGCTTGACCGGCAGCGGGGGGCC |
| | GCTGTTATGGGAGACTCAGCTGGGCCTGGCCTTCCTGAGGGGCCTCAGCTA |
| | CCACGATGGGGCCCTTGTGGTCACCAAAGCTGGCTACTACTACATCTACTC |
| | CAAGGTGCAGCTGGGCGGTGTGGGCTGCCCGCTGGGCCTGGCCAGCACCAT |
| | CACCCACGGCCTCTACAAGCGCACACCCCGCTACCCCGAGGAGCTGGAGCT |
| | GTTGGTCAGCCAGCAGTCACCCTGCGGACGGGCCACCAGCAGCTCCCGGGT |
| | CTGGTGGGACAGCAGCTTCCTGGGTGGTGTGGTACACCTGGAGGCTGGGGA |
| | GAAGGTGGTCGTCCGTGTGCTGGATGAACGCCTGGTTCGACTGCGTGATGG |
| | TACCCGGTCTTACTTCGGGGCTTTCATGGTGTGAAGGAAGGAGCGTGGTGC |
| | ATTGGACATGGGTCTGACACGTGGAGAACTCAGAGGGTGCCTCAGGGGAAA |
| | GAAAACTCACGAAGCAGAGGCTGGGCGTGGTGGCTCTCGCCTGTAATCCCA |
| | GCACTTTGGGAGGCCAAGGCAGGCGGATCACCTGAGGTCAGGAGTTCGAGA |
| | CCAGCCTGGCTAACATGGCAAAACCCCATCTCTACTAAAAATACAAAAATT |
| | AGCCGGACGTGGTGGTGCCTGCCTGTAATCCAGCTACTCAGGAGGCTGAGG |
| | CAGGATAATTTTGCTTAAACCCGGGAGGCGGAGGTTGCAGTGAGCCGAGAT |
| | CACACCACTGCACTCCAACCTGGGAAACGCAGTGAGACTGTGCCTCAAAAA |
| | AAAGAAAGGAAGAAAAAAGAAAACTCAGGAAACAGATCTTGGGGGACACTC |
| | CAGGGAACCCAAAACTCAAAGGCGGAGAGCTCAGTGGGCACCACCAAGGCG |
| | AGATGAAGCCCCAGCAGGCACCTTCAGAAGACCCACGTAGACTGCAGACCC |
| | TGCCACGGACAATACTAAGGACAAAAACCCAGAGACTTGGGGTCTGTGGGC |
| | CCCCAAACATGGGGTAAAGTTGATTTGCCTGATATTCAGGAAGAAGGGGTG |
| | AGGGGTGGGTATTTATGCTTTTGATTCAGAAGAAAGTGGGGCTTGGGATTC |
| | CAGGGACTTGGCTGGGGGTGGGAAACTTCATCCACTTCCCTACTCTCATCA |
| | TGAGTACGGACAGGGTGGGCGGGAGACTGATCATCGGGACTCATCATGAAG |
| | AGCCCAGCCCCACCCCACATACTCAGATCCCACCCACAGACTGGTGGCCAC |
| | ACCTCAGCCTGGTCACAAAGAGTTACACTCAGATACATGAGCACGGCAGCG |
| | TGCTCATAACTGTTTAACAACCAGCTGTCCTGGGAGGGGGACAGCTTTGTA |
| | ATGTTTGCCAATTTCCATGGTGTAAATGCTACCACCATGGCTGATTTCATC |
| | ACTGCCAAGCATAGACATCCCTAATAGGACACCACGGATCTGTCCCCGGCA |
| | TCCGGCCCAGGGCCTGGCACAAAGCATGCTCTAGGGAAATGCTTGCTGATT |
| | GAAAGGAAGGAAGAATGACTCTACAGTCACACCTATGGCATCCCACAAAAT |
| | CTGTCACATGGCTGCATAATCTCAGCCACTCTTTCACAACTATAGACTCAT |
| | ACACGCGAAGTGCCAGATTCATGCACAACCACACAATCACATGGAAGTCAC |
| | AGACGGCATCACAGACAGTCACAGCACTGTGTGTATGTTATAACACAAGCA |
| | CACAAAACTCAGACAGCATCCCAGCTACACAGCCACTCCCAGAGGTGTCAC |
| | CGTCACACTTGGTAATTAATACTCATTACATTAGACACAGACAGACCAAGT |
| | TATAGTCAGACCTGGTTACACACATACACACACACAATATCACCATGACAA |
| | ATACACATTACACACACACAACATCACAATGACAAACACACATTACACACA |
| | CAACATCACGATGACAAACACACATTACACACACAACATCACGATGACAAA |
| | CACACATTACACACACATCACAATGACAAACACAACATTACACACACACAA |
| | CATCACAATGACACACACATCACACACACATCACAATGACAAACACACAAC |
| | ATTACACACATATACACACAGCCTGAGGGCCCTCCCCAGCCCAGACTAACA |
| | CATCTCGGGGTGAGGACCAGACCTTGTTCATAACCCTGGGCCTCTTAACCA |
| | CTGATCTTTGAAATAAATGGCAAATAGTTGTACCTGGATCTGTCTAGTTCT |
| | TAGGGGAACAAACTGAAGAAGGGTGGAGAGGAATTGTCAGGCCTAAAGAGC |
| | CCCACAGGGAAAGGGAGGAGTCGGATGGGGGGCAACCATCAGCAACAAGTG |
| | GTGGCTCCTAGAGGCAGAGGGATGGAGGTAATGACCCATGGAGGTCATTCT |
| | ACAGATGAGGAACCTGGACCCAGTTGGCTCAAGTCCATGCAGGAAATGTGG |
| | GGGAAACCAGAGACCTCACGTCTGGATCTGGCTTCCTCTCCAATCCACAAT |
| | TCCTGAGGAAGTAGAGGCTACATCCCGCAAGACGCCCTTATTAGACACATC |
| | CAGGACAGAATGACAATCCGCCAAGCCAGCTGGAAGCATAAAACACAGGGA |
| | GCTGGTGGGTTGGGTGGGGGCAGATAATGATATGCATACAAATTAGAGGGT |
| | CTATGCAAATGAGCATTGCTGCAGTGTGGCTGGAGGGAATCCTTAGTTCCT |
| | AGGATTCTAGGATATGGGTTTCGACCCCAGAGGTGAATGTATTGTTATTAT |
| | TGTTTTGTTGTTGTTGTGAATGACAAGTCAAAATTTGTGGGTTATTGTTGT |
| | TATCGCCAATAGTATTCTTGTCATTGTTGCACAGTACAGAGATGAAGGAAA |
| | CAGATTTTGCAATCAGATGATCCTGGGTTCTGAGTCCACTCTGCCACTCAC |
| | CAGCTATATGACCTCCAGCAATTTCCATCACCTCTCAATGCTTCAGTTTCC |
| | CCATCGGCAAGATGGTTGTGGGGGGAGAGGAACAACAGTACAGATTCACCA |
| | TCCCAAATTCAAAATGCTCCAAAATCTAGGCCGGGCGTGGTGGCTCATACC |
| | TGTAATCCCAGCACTTTGGGAGGTCAAAGTGGACGGATAACCTGAGGTCAG |
| | GAGCTCCAGACCAGCCTGGCCAACATGGCGAAACCCCATCTCTACTAAAAA |
| | TACAAAAAATTACCTGGGTGTGGTGGGGGGCACCTGTAACCCCAGCTACTC |
| | GGGAGGCTGAGGCAGGAACCCTGGAGGTTGAGGTTGCAGTGAGCTGAGATC |
| | ACACCACTGCACTCCAGCCTGGGTGACAGAGCAAGGCTCCCATCTCAAAAA |
| | ACAAAAAAACATGCTCCAAAATCTGAAACTCTTTGAGCCCCAGTGTGATGC |
| | CACAAGTGGGAAATTCCACAACTCATCACATGTGATAGATTGCAGTGGAAA |
| | TGCAGGCACACACCACGAAGTTTACTCAGCATCCTCAAAGGAAATCCCCGT |
| | CAGTAGCTATATATCATTTTCTCACATGCCAGATAGGTATCTCTCATCTTT |
| | TACTGTTAGGTACTTCTGTGTTGAATAGGTGGAGGAAAATGATTGCTGGTT |
| | AGTAGTATATAAATTCAGAGTCAGGAAGGATGGTGATGTCGGCTGGGTGCA |
| | GTGGCTCATGCCTGTAATTCCAATGTGATACCCTACCTTGTGTTTAACGTG |
| | ATTGACTCTCCCTTAGCTGAGAGGGCCAGGCAGACTCTATTTTGGCTTCTT |
| | CGCTTGCAGTCTCTCACCCACCCCCCTTCCTCAAGGACTTAAGCTGACTCC |
| | CAGCACATCCAAGAATGCGATTACTGATAAGATACTGTGACAAGCTATATC |
| | CACAATTCCCAGGAATTCGTCCGGTTGATAGCACCCAAAGCCCCCGCGTCT |
| | ATCACCTTGTGATAGATTTAAAGCCCCTGCACCTGGAACTGTTTGTTTTTC |
| | TGTTACCATTTATCTTTTTCACTTTCTTGCCTGTTTTGCTTCTGTAAAATT |
| | GCTTCAGCTCGGCTCCCTCTTCCCCTTCTAAACCAAGGTATAAAAAGAAAC |
| | CTAGCCCCTTCTTTGGGGTGGAGAGAATTTTGAGCGCTAGCCGTCTCTCAG |
| | TCGCCGGCTAATAAAGGACTCCTGAATTAGTCTAA (SEQ ID NO: 129) |
| | >NP_003798.2 tumor necrosis factor ligand superfamily |
| | member 14 isoform 1 [Homo sapiens] |
| | MEESVVRPSVFVVDGQTDIPFTRLGRSHRRQSCSVARVGLGLLLLLMGAGL |
| | AVQGWFLLQLHWRLGEMVTRLPDGPAGSWEQLIQERRSHEVNPAAHLTGAN |
| | SSLTGSGGPLLWETQLGLAFLRGLSYHDGALVVTKAGYYYTYSKVQLGGVG |
| | CPLGLASTITHGLYKRTPRYPEELELLVSQQSPCGRATSSSRVWWDSSFLG |
| | GVVHLEAGEKVVVRVLDERLVRLRDGTRSYFGAFMV (SEQ ID NO: 130) |
| Mouse LIGHT | >NM_019418.3 Mus musculus tumor necrosis factor |
| | (ligand) superfamily, member 14 (Tnfsf14), mRNA |
| | TTTTGCAGTTTGCACAGCCCGAGCGTGTTGGGCAATTGTGGTTTCCTCCGG |
| | AGAGGAGGAACTCAGGCTTGCCAACCCTTTCCCTGGGCTTCGGAGCCTCAG |
| | CTGCTCTGGCATGGAGAGTGTGGTACAGCCTTCAGTGTTTGTGGTGGATGG |
| | ACAGACGGACATCCCATTCAGGCGGCTGGAACAGAACCACCGGAGACGGCG |
| | CTGTGGCACTGTCCAGGTCAGCCTGGCCCTGGTGCTGCTGCTAGGTGCTGG |
| | GCTGGCCACTCAGGGCTGGTTTCTCCTGAGACTGCATCAACGTCTTGGAGA |
| | CATAGTAGCTCATCTGCCAGATGGAGGCAAAGGCTCCTGGGAGAAGCTGAT |
| | ACAAGATCAACGATCTCACCAGGCCAACCCAGCAGCACATCTTACAGGAGC |
| | CAACGCCAGCTTGATAGGTATTGGTGGACCTCTGTTATGGGAGACACGACT |
| | TGGCCTGGCCTTCTTGAGGGGCTTGACGTATCATGATGGGGCCCTGGTGAC |
| | CATGGAGCCCGGTTACTACTATGTGTACTCCAAAGTGCAGCTGAGCGGCGT |
| | GGGCTGCCCCCAGGGGCTGGCCAATGGCCTCCCCATCACCCATGGACTATA |
| | CAAGCGCACATCCCGCTACCCGAAGGAGTTAGAACTGCTGGTCAGTCGGCG |
| | GTCACCCTGTGGCCGGGCCAACAGCTCCCGAGTCTGGTGGGACAGCAGCTT |
| | CCTGGGCGGCGTGGTACATCTGGAGGCTGGGGAAGAGGTGGTGGTCCGCGT |
| | GCCTGGAAACCGCCTGGTCAGACCACGTGACGGCACCAGGTCCTATTTCGG |
| | AGCTTTCATGGTCTGAAGGCTGCGGTGACAATGTATTTTGTGGAGGGACCT |
| | CTCCAGGACTCACCTCAAACCCAGCAATAGGGTTTGAAGTCCTCCCTTTAA |
| | GGAGCCCTGAACTCTGCAGTGCTCGGGGCGGTGTAGACTGCTGACCTGCTT |
| | TGGGCAATCTTCAAATCAGAGACCTGGAGACTTGGGGCGTGGAGCCCAGGA |
| | GCGAGGGGTCAGCTCATTTGCCTGATATTCAGGAAGAAAGAATCAAGCTGG |
| | GGTATTTATGCTTCTGATGCAAACACTGAGATTTCGGCTTTCTGGGTTTTG |
| | AGCTGGAGGCAAGAAACCTTCCCAGAGTGTCATCAGGACCATGTTGGCAGG |
| | ACTTGGGGCTCCAGACTTGCCACCACACTCTGGCCTCTCCCATCCATCCGC |
| | TGCATTGGTTTCCAGCCACCAAAACAGCACTGGCCCCCTGGCTGCAACTGG |
| | CCAGGTACGAGCTTCTGAGCACCTACATTCCTCAGGGACATCTTGATGAGA |
| | TCTCAGTACTCAGTCCAATGCGCAGCAGCGACAGACATGCCAGGAATGGTT |
| | GGTCAGAAGGGAAGGGAGGAAAGGGAGGAAAGAAGGGAATGCAGAAGAGAA |
| | GGGGGGAAAACAAGACCAAAACAAAACAGCAACAACAAAGCGGCAGGGAGG |
| | AGGTGACACCCTTGGGGATACTTTAGTCAACACACTTAGAACAGATTGTGC |
| | CAGGCCTGTTGGATTCCTGGAGTTGATGGGATCGTGGGAAGGCACAATGGG |
| | GAGCAAGTGGGCTTGGGTTATGGCTCAGTGGGTAAAGTGCAATTATGGGGA |
| | TCTGAGTTTGAATCCCTGGTACCCATATAAAGACACAGATGCGGTGATGGG |
| | CACTTGTGACAATGAGATCATCAATAGGGAATGGAGACAGGAGGGACCTCT |
| | GGGGTTCACTGGCCAGGCAGTCTAGCTGAATCAAAGAGCTCCAAGTTCAGT |
| | CGATAGCTCCTGAAGATGACAACTGAGGCTATTCTCCAAACCCCACACGCA |
| | GGACACATGCGTAATAAATAAAATTTTAAAAAT (SEQ ID NO: 131) |
| | >NP_062291.1 tumor necrosis factor ligand superfamily |
| | member 14 [Mus musculus] |
| | MESVVQPSVFVVDGQTDIPFRRLEQNHRRRRCGTVQVSLALVLLLGAGLAT |
| | QGWFLLRLHQRLGDIVAHLPDGGKGSWEKLIQDQRSHQANPAAHLTGANAS |
| | LIGIGGPLLWETRLGLAFLRGLTYHDGALVTMEPGYYYVYSKVQLSGVGCP |
| | QGLANGLPITHGLYKRTSRYPKELELLVSRRSPCGRANSSRVWWDSSFLGG |
| | VVHLEAGEEVVVRVPGNRLVRPRDGTRSYFGAFMV (SEQ ID NO: 132) |
| Human TL1 | >NM_005118.4 Homo sapiens TNF superfamily member 15 |
| | (TNFSF15), transcript variant 1, mRNA |
| | AGAGGTGCCTCCAGGAGCAGCAGGAGCATGGCCGAGGATCTGGGACTGAGC |
| | TTTGGGGAAACAGCCAGTGTGGAAATGCTGCCAGAGCACGGCAGCTGCAGG |
| | CCCAAGGCCAGGAGCAGCAGCGCACGCTGGGCTCTCACCTGCTGCCTGGTG |
| | TTGCTCCCCTTCCTTGCAGGACTCACCACATACCTGCTTGTCAGCCAGCTC |
| | CGGGCCCAGGGAGAGGCCTGTGTGCAGTTCCAGGCTCTAAAAGGACAGGAG |
| | TTTGCACCTTCACATCAGCAAGTTTATGCACCTCTTAGAGCAGACGGAGAT |
| | AAGCCAAGGGCACACCTGACAGTTGTGAGACAAACTCCCACACAGCACTTT |
| | AAAAATCAGTTCCCAGCTCTGCACTGGGAACATGAACTAGGCCTGGCCTTC |
| | ACCAAGAACCGAATGAACTATACCAACAAATTCCTGCTGATCCCAGAGTCG |
| | GGAGACTACTTCATTTACTCCCAGGTCACATTCCGTGGGATGACCTCTGAG |
| | TGCAGTGAAATCAGACAAGCAGGCCGACCAAACAAGCCAGACTCCATCACT |
| | GTGGTCATCACCAAGGTAACAGACAGCTACCCTGAGCCAACCCAGCTCCTC |
| | ATGGGGACCAAGTCTGTATGCGAAGTAGGTAGCAACTGGTTCCAGCCCATC |
| | TACCTCGGAGCCATGTTCTCCTTGCAAGAAGGGGACAAGCTAATGGTGAAC |
| | GTCAGTGACATCTCTTTGGTGGATTACACAAAAGAAGATAAAACCTTCTTT |
| | GGAGCCTTCTTACTATAGGAGGAGAGCAAATATCATTATATGAAAGTCCTC |
| | TGCCACCGAGTTCCTAATTTTCTTTGTTCAAATGTAATTATAACCAGGGGT |
| | TTTCTTGGGGCCGGGAGTAGGGGGCATTCCACAGGGACAACGGTTTAGCTA |
| | TGAAATTTGGGGCCCAAAATTTCACACTTCATGTGCCTTACTGATGAGAGT |
| | ACTAACTGGAAAAAGGCTGAAGAGAGCAAATATATTATTAAGATGGGTTGG |
| | AGGATTGGCGAGTTTCTAAATATTAAGACACTGATCACTAAATGAATGGAT |
| | GATCTACTCGGGTCAGGATTGAAAGAGAAATATTTCAACACCTTCCTGCTA |
| | TACAATGGTCACCAGTGGTCCAGTTATTGTTCAATTTGATCATAAATTTGC |
| | TTCAATTCAGGAGCTTTGAAGGAAGTCCAAGGAAAGCTCTAGAAAACAGTA |
| | TAAACTTTCAGAGGCAAAATCCTTCACCAATTTTTCCACATACTTTCATGC |
| | CTTGCCTAAAAAAAATGAAAAGAGAGTTGGTATGTCTCATGAATGTTCACA |
| | CAGAAGGAGTTGGTTTTCATGTCATCTACAGCATATGAGAAAAGCTACCTT |
| | TCTTTTGATTATGTACACAGATATCTAAATAAGGAAGTATGAGTTTCACAT |
| | GTATATCAAAAATACAACAGTTGCTTGTATTCAGTAGAGTTTTCTTGCCCA |
| | CCTATTTTGTGCTGGGTTCTACCTTAACCCAGAAGACACTATGAAAAACAA |
| | GACAGACTCCACTCAAAATTTATATGAACACCACTAGATACTTCCTGATCA |
| | AACATCAGTCAACATACTCTAAAGAATAACTCCAAGTCTTGGCCAGGCGCA |
| | GTGGCTCACACCTGTAATCCCAACACTTTGGGAGGCCAAGGTGGGTGGATC |
| | ATCTAAGGCCGGGAGTTCAAGACCAGCCTGACCAACGTGGAGAAACCCCAT |
| | CTCTACTAAAAATACAAAATTAGCCGGGCGTGGTAGCGCATGGCTGTAATC |
| | CTGGCTACTCAGGAGGCCGAGGCAGAAGAATTGCTTGAACTGGGGAGGCAG |
| | AGGTTGCGGTGAGCCCAGATCGCGCCATTGCACTCCAGCCTGGGTAACAAG |
| | AGCAAAACTCTGTCCAAAAAAAAAAAAATAAAATAATAACTCCAAGCCTTT |
| | AAAAAATATCATCTGAAACTGTTACATCAGATTTCTGGCACTCTACTGACT |
| | GTGGAAGATAGCCAGCTGACTGGAAGATAGCCAGCTGATTAGTTCCCTGAA |
| | GAAACCTGAAGACAGATACCTGGTTAACTAGATCAACTACACTGCCAACTT |
| | GTTTGATGCTGAGAGACAATGGACTTATTCCATGGGGGAAGGGAAAAAAGA |
| | AGTCAATCACCAAATCTGAAGAAGTTAACCTAGATCTTTGAGGTTTGATTT |
| | GCAACTTTATATGCAGAGTATTATGTGGGTATTTTCCCTTAAAATATTCAA |
| | AGGGATTTACATATGGGATTAGCTAATGAGCCTAGCCAAGACCTTCCCTGG |
| | AGGACAGGCTGGTCATTGCGGAGGTCCCTTCTGTGCTTCAGTGGGTTCATA |
| | TCCTCTAGTCCGTATGATTTTCCTACGCTAATATGTCAAGGGCAGGAGAGG |
| | CAGCTCTGTTCTCCTAGCCTTTGTTGACTTGTCTGCAAAGCAGGAATCTGC |
| | CCATTTGTTTCCAAGGAGCAAATGAGCTCATGAGAATGAAAGATGTTAACT |
| | TCATGCATTCTGTGCCATCTGAGCATTTCGGTATTATATGACTGGTGACCC |
| | TTGGCCCGTATTATAAATGCTTCCTATCCTGGGAGACCTCATGGATGAGTC |
| | TGAGAGGAAATTTGGCACCAAAATCACTCTCACTCTGGTTTCCAGTAGACT |
| | ATAGAGGCAGAGAGGCATTTGAGAGGCTCCTGAGCAAAGTGTCCAGTGTAG |
| | CAGGAGCACTTCATTAATATTTATTGAGTTATAATTAAATAAAAATTAATT |
| | TCTGATTTCTCAGTTTGGAGGTTAAGGCTCTAAATATATTTTCTAACCTCT |
| | GCTAGGCTAACTTAAGCCAGGCCTTTTTCTTGCCTTCCCTTTCTCAAAACA |
| | GTCAGCACAGACTCAGTGGGAGCACAGAGGAGTGTGGTCACCTCCACCTGG |
| | CTCACCAGAGTCTTCATAGAGGAAGTGAAGCCTGGAAGAAACTGGGCGGGC |
| | CCCAGATGACCACAGGGAAAGGGCATCTCAGATGGAGGAATTACCCTTGAC |
| | TTAAAGCAGAAAAGAAAGATTTCTCAGTAACTCCAAAACTTGCTTGATAGG |
| | AGAATATTCCCTCAACCAATTCCTAGGACAATATTTATTGGTAGATCAAGA |
| | ATGTTTCCTCAATAACTCTAGTCTAGCTCCATGATCAGAACTAACACCCAT |
| | TAAAAACATAAAATGTTCTTTCTGAACCGGTCTTCATGGTGCGTGAGAGCA |
| | CCAAGCAGCTTTGGTATGCAGGAGGAGTTTTGCACAGAAGAGTGGCCTGCT |
| | CAAACCTGCCCACTGTTCTGTAGGTGATCTGGTGGATCTGGAAATTTATCC |
| | CAAGACAGGAATTTCCTAATATTCGAAGACATTTGAGGCTTTGGGAAATTC |
| | TCTGCTGTGCATTTATTTGGCTCCTGTCATAAGCTTGTTTTTTAAAGAATG |
| | TATCATAGCTCAAGTTTTTACTGCTGATTTTGTTAAATTCTGTATAGTATA |
| | TTTTTTACGGAAAGGCACAGTCAGACATTCCTAATAGGGCTCATGTCAGAA |
| | CTTCTGTTCCCAAGGCATTATCTCCATAGCAAAAATTAGTGCACTGTTTTC |
| | AAAAGTGAGGTGGGAAAATGCTTTTAAGATCATGTGATGTTCCCCTAAAAG |
| | GGGTTAATGGGGTGTATTCAGGGTTTGGGAGGGAGGAAGAAGCATGCTTTA |
| | GAAAACAGTAAATTTAGGGAGAAAATGCTTTGTTGGTTAAATGTCACTCAA |
| | AAGGCTGAATTCAAATCAATTCCACAAACATTTACTGAGTACCTACTGCCC |
| | CTGGGGACACAGAGATAAATTATTTAGTCTCAGACACACTCATTCTAACTT |
| | CCCAGCACCTCTACTGTCTGCAGATTCTTTAATTTATTTTGGTTGTATTAG |
| | CTAATTAATTCGTAAACTTTAGGCACATGGATCTATTCTCATTATGAAAAT |
| | GGATGCCATTTGATTAAGGCTGATGACTAACAAAATGATTTGTGTTTACTC |
| | GAAGTGTTTTTTTAAAAATAGCTACTCAAGGATAGTTTTCCATAAATCAAG |
| | AAGGTAAAAAAGTTCCCATTTTTTATTGTAGAATCCATTATTTAAACTACA |
| | TGTAGAGACAGGTTATTATTTGCTATATTCAAGTTTGGTCATCAATACCCT |
| | TAAAAATATTAGAATTTTATGGATGACCCAGAAATGCTTTGAAAATCTGTG |
| | TTCCTCAGCAAATACAGAGACCATGATCAAAATGCACAGAATCACTAACAT |
| | TTTGATGCTAGCATGGTTTCAGTCTATTTGGCAGAACAGAATTGATTATGC |
| | TACTAAAATTTCTTTTTCTTTTTTTTTTTTTTTTTTTTTGAGACAGAGTCT |
| | TGCTTTGTCACCCAGGCTGAAGTGCAGTGGCAGGATCTCAGTTCACTGCAA |
| | CCTCTGCCTCCCAGGTTCACGCCATTCTCCTGCTTCAGCCTCCCGAGTAGC |
| | TGGGACTACAGGCTCCCACCACCATGCCCGGCTAATTTTTTGCATTTTTAG |
| | TAGAGACGGGGTTTCACCGTGTTAGCCAGGATGGTCTCGATCTCCTGACCT |
| | CGTGATCCGCCCGCCTCAGCCTTCCAAAGTGCTGGGATTACAGGCGTGAGC |
| | CACTGTGCCCGGACTCTGATTTTTTTTTTACTAAGGTACAGTAAGAAAAGG |
| | GAAAAGTGTACGTTTTCACTTCCTGAAATATGTCAGGTTGAATCAATAATA |
| | GAGCACACCAGAACTCTTGGCTCCATTTCAACCTAAACTATTCAGTTCTCA |
| | TCACCCCAGAGGAAATTCCGCCTCTGTGCTGGTCAGTAATCCCCCTGGATT |
| | ATAAAAGTTTAACTAACTCACTGTGCACAAGGCACGGCCATTGCCAACATT |
| | CTCTTGCAAGGTATTTTCCCAAGCCCTTACCCAATTCTGTTTCCATGATTG |
| | TGACATTGGGGATTAATTCTGCAAGACAGAACTGTTTATATTCTGTACCTT |
| | AAAAACACATGCAAACATCTCTTGCCTTAAGATTTCTGGCTTTCCTATGGC |
| | CCAGAGTCCTAGAAGTGTTTTGATATTTGTAGCAGAATTTTCAAGTGTACA |
| | TCCTTATCCTGGATATTAACATTTTTGCATCATATTGGCAGCTGGACCTAC |
| | AGAGAATTTAGTAGACTGTTAACCTAATAAGCCTTGAATCCTTTTGCACCA |
| | GTGGTGAGAGAATGTGGATCAGAGCCATCACCTCCATGCCCCGTCACCCTC |
| | TAACAACCACATTTACAACTTCCCCAGCTCTGAGACACACTTGCCTCCACC |
| | CCTTCCATCACCCCATTTTAAGATGAAAATACCACACCAGCCTGGAAGGAA |
| | GAAGTTACTTGCCCAGGGCCACATAGTGAGTTAAGGGCTGATCTAGAGCTA |
| | GGAAGCTGTCTTCCTGAACCATAATCCTGGACTCTTCTAACCTCTCTACTC |
| | ATCGCAAATAGAGTTCATTTTAGTGATTTGAAGGAAGATGGGACAAGTATT |
| | TTCAAACACCTGTAGGACAACATGGAAGTGGGAGGAGACTTCTACTGTAGC |
| | TCCCCAGAGAAGAGAGCTAGGGCTACAGAGTTGCAGTTACAAGGTTGCCCT |
| | CTCTGGCTTGATCCCCAAAGGAATTTTCTACTCCAAAATAGAATTTTTCTA |
| | GGATGCTATTTCTCAGTCCCTGGAGATACTCAAACAAAGGGCTTGTCACAA |
| | GGGTTTTTGTAGAAGCTATTCTTCACAGAGGTTGGGGGAGAGATTAAGCCA |
| | AAGGATCTCTGAGGTCTTTTTCAAATCTATAATTATGTGGCCTTTTGTTCA |
| | TTGACTTCCATGTGTTCTAGTTGATCATTACAAACCTGGCAGGCCTTCTCA |
| | AGGGTTCAGTAATTAGCTGTCATTTCCCATTTGTCCAGAGAGTGTCCAACA |
| | CAAAATACCCCTAAGATCTTGGCCAATAGAGAAATGTCATGGAATTTTAGA |
| | AATGACAGTATCTGCGGAGTTTATTCCAAGTTATATCATTTCAAAGATGAA |
| | GAAACCCAGGCTCAGAGGGAGCCATCACATCCACACCCTGTCACCCTTCGT |
| | GGCCAGTGCCAGACAGTAGCTAGTTGGATGCTAAAAGTAGAATTTAGATAT |
| | CTTAACAATAAGCCCAGCAGTCTTTCAACTTCATTCGTAAATCATTTTTGT |
| | TTTGAGCATCTGTCACGTGGCAGCACTTGCCTGGATACTGGAGAGCTGAGA |
| | AGGAATGCGACAGGCAAGTCCTACTCTCACAGTGTATACATTCAGGAGGAA |
| | CAAGACACACAGTGCCAAGTAAATAAAGTAGCTGAACTTCATCAAATGATT |
| | TTATTCTTAAAGTCATTAAAGCATGTAATGTTCCCCTTTTTTTGTTTCAGG |
| | GGTGTACAGATTGAAGAAGTGTAGGTGTTTATGTGGTTTTAGTGACAAACC |
| | CCATGTGCTTTCATTGATTTTATGTTTTATGTTAAAACATCAACCGCAAGG |
| | TAAAATGCATATTGTATGTTGTTGGATACGTACTTAACTGGTATGCATCCC |
| | ATGTCTTTGGGTACTAGTGTATGAATTCTAATCTCTGTAAATGAAATGTTG |
| | TATGTGTTAATATATTTAATAGATGTAACTTAATAAACTGGCATTGAAGAC |
| | TGAA (SEQ ID NO: 133) |
| | >NP_005109.2 tumor necrosis factor ligand superfamily |
| | member 15 isoform VEGI-251 precursor [Homo sapiens] |
| | MAEDLGLSFGETASVEMLPEHGSCRPKARSSSARWALTCCLVLLPFLAGLT |
| | TYLLVSQLRAQGEACVQFQALKGQEFAPSHQQVYAPLRADGDKPRAHLTVV |
| | RQTPTQHFKNQFPALHWEHELGLAFTKNRMNYTNKFLLIPESGDYFIYSQV |
| | TFRGMTSECSEIRQAGRPNKPDSITVVITKVTDSYPEPTQLLMGTKSVCEV |
| | GSNWFQPIYLGAMFSLQEGDKLMVNVSDISLVDYTKEDKTFFGAFLL (SEQ |
| | ID NO: 134) |
| Mouse TL1 | >NM_177371.4 Mus musculus tumor necrosis factor |
| | (ligand) superfamily, member 15 (Tnfsf15), mRNA |
| | ATCAGAAGTCTCTCCAAGACAGCAGAAGGATGGCAGAGGAGCTGGGGTTGG |
| | GCTTCGGAGAAGGAGTCCCAGTGGAAGTGCTGCCGGAAGGCTGTAGACACA |
| | GGCCAGAGGCCAGGGCCGGGCTAGCTGCCAGGAGCAAAGCCTGCCTGGCTC |
| | TCACCTGCTGCCTGTTGTCATTTCCCATCCTCGCAGGACTTAGCACCCTCC |
| | TAATGGCTGGCCAGCTCCGGGTCCCCGGAAAAGACTGTATGCTTCGGGCCA |
| | TAACAGAAGAGAGATCTGAGCCTTCACCACAGCAAGTTTACTCACCTCCCA |
| | GAGGCAAGCCGAGAGCACACCTGACAATTAAGAAACAAACCCCAGCACCAC |
| | ATCTGAAAAATCAGCTCTCTGCTCTACACTGGGAACATGACCTAGGGATGG |
| | CCTTCACCAAGAACGGGATGAAGTACATCAACAAATCCCTGGTGATCCCAG |
| | AGTCAGGAGACTATTTCATCTACTCCCAGATCACATTCCGAGGGACCACAT |
| | CTGTGTGTGGTGACATCAGTCGGGGGAGACGACCAAACAAGCCAGACTCCA |
| | TCACCATGGTTATCACCAAGGTAGCAGACAGCTACCCTGAGCCTGCCCGCC |
| | TACTAACAGGGTCCAAGTCTGTGTGTGAAATAAGCAACAACTGGTTCCAGT |
| | CCCTCTACCTTGGGGCCACGTTCTCCTTGGAAGAAGGAGACAGACTAATGG |
| | TAAACGTCAGTGACATCTCCTTGGTGGATTACACAAAAGAAGATAAAACTT |
| | TCTTTGGAGCTTTCTTGCTATAAGGAGGAGAAAACCATCATTCCAAGGGGC |
| | TCCCCTGCCTCCTACTTTCCAATTTCCTTTTCTCATATGGATCTATAAACA |
| | GGGGCTTTAGAGGGATCAGGGAAGGGGACAGTGGTTTAGCTATATAATTTA |
| | GGAACCCAATATTGATCCGTATATGCCTTATGGACTAAAATAGTAAATGGA |
| | AAACCCAGTACAGCTCATGTTTGATAGAGACCTGCTGGGTTTTAAAAATTG |
| | AAACACGCCTCATCCAATGGCACAATCTACTGATTTCAGGACAGAACCTTT |
| | CCACAGTGCCCTCTGTCCAAGTCCTTTCTGAATTCAGCAGTTCAGTTAGAG |
| | CTGAATTCGACAATGAACTTACTCCAGATCAAGAGCTAAAGACAGAATCCA |
| | AAGAAAGACTGAGAAAATGATGTTATTTCTCCAAGAGGCAATGCATTTCCA |
| | CATTCTTTTGTGCCTAACCTAAAAAATAAGAAAGAAGAAAGGAAGGAAGGA |
| | AGGAAGGAAGGAAGGAAGGAAGGAAGGAAGGAAGGAAGGAAGGAAGGAAGG |
| | AAGGAAGGGACAAGAAAAGACAAGACAAGACAAGAAAAAAGAAAAAATGGT |
| | ATTTCTCGTGAATATTCCCTAAAAGGAATTGGTTTTCTGCTGTGAAGGAGA |
| | AACCTCACCTTTCTTCTGATTGCATCCTTTAGTATCCAAACATACAAGTGG |
| | GAATTCCAAATGCACATGGAACATAGAACACTTTTATTATTGTGAGAACAT |
| | GTTTATTGAGTACCTACTATGCTCTGGGCACTCAGCCCACAGGACCATGAA |
| | GAGAAAGTCAAATTTTCTTAAAAACTAAATGAATCCTCAATACATACTTCC |
| | TGATCAACTACCACTCAAAATGTATAACTTCCAAAGTATAACTTCAAGTCA |
| | GCCATCTAGGTGGTTTCTTGGGTAAAGGTGCTTGTCATTAAGCCTGACACC |
| | TGGGTTTGACCTCCCAGAACCCAAAAGCTGGAAGGAGAGAATTGGTTCCCA |
| | CAAATTATCCTCAAACCCCCATACAAATGATGTGGCATGCACACATGTAAC |
| | TAAATAAATAAGTGTAAAACAAAAACAAAAACAAAATTTTAAAGAAAAATT |
| | TCAAGTCCTGAAAGACAGCATTCCTGAGAATGTTGTCTCCATCGTTGTCCA |
| | GTATAGGCTAACCAGCTGATAGAGACACTGAAGGAATTTAAAGACAGACAT |
| | CAAGTGAAATGGAGCACTGTAGAAACACTTGATTCATGCCAGGAGTCAATG |
| | TACTATGAAGACCAACAACAAAGTGTCAGTCATCAAATCCAGAGGTGTTTA |
| | TCTAGATCTGCTTTCAAGTTTGGTTTGCAGCCTTTATATAGTCTCTATTAC |
| | AAATGCTCGTGTCATGGTAGATGCCACAAGGAGTCAGAGGGTAAACTTAGC |
| | CCCAAACCACTGCTGAGCCATCTTCTAGGAAACCTTCGAAGCAGAGCTGGG |
| | CAGCGTGACTCCCACACAATGACTGGGAAAGTAGTAGCTGATCAAAATTTG |
| | TTGAGTAATAATTTGTTAGAAAATTCATCTCCACTGCCTACTAAACCTAAG |
| | TTGTATACTATCTAGCTTCTGCTAAGCCAACTTACATTGGCCACTTTTTCT |
| | GTCTTCAACTTCTTGAAGTATCACAGGTCTCAGTGAGAACACAGGGAAAGG |
| | TGAGGTCGCCTTCCCCTGGTTCTTCATAGGGGAAACCACACCTGAAAGAAG |
| | ATGAGCAGCCTGAGGTGACCTGGAGGAAGGGCTGTCTCAGAAGAAGGACTT |
| | ATTTTTTGGCTTAGGTCTAAAACCTTGAGAGTAATGCTCACTGGTCAATTG |
| | AGGATGCTTTATCAATGACTCCAGTCTGACTCCAAGGTCAGAAAGGAGAGT |
| | GAGATGCTCTCTCTGCCTGCATATATCTTCATGGAACATGAGAATATTGAG |
| | CAACATAGACTTATAGGAAAACACTTGCCCAAAAGTAGCCAGAGTGACCTG |
| | GTCATCCCCTCTACTAAACCCAAGCTTTGTGTCAAGGGCCTTCAAAGCTGC |
| | CCAGAAGTGATCTGGATGGCTTGGGAATTTATCCAAGACAGGAATTTCCTG |
| | ACAGCCAAAGATGCTTGAGTCCTTGTGCCTGACATGCATTTATTTTGCCCC |
| | TGTTTATTGAAGACTGTAACTGTTGATTTGTGGGTATACATACATACATAC |
| | ATACATACATACATACATACATACATATGCTGTCATGAAGGCAGCATCAAA |
| | CATTACTAATTGGACTCAAACCAGCATTTCTGTTTCCAAGATACTAAGTAT |
| | TCCCATGCAAACAGGAGCATGCTATTTTTCTAAAGCAAAATGAAAAAAATA |
| | GTTTTGAAAGTATATATATGATGGAGTCAAGTGTAATGGCATACATCTGTA |
| | AACCCAGCACATGGGATGCTGAGCCAGGAGGATTGCCGTGAGTTTGAGGAG |
| | AACAGGGGCTAAATAGTAATTTTCAGGAAAGCCTTGCCTATATAACAAGAC |
| | CTTGTCTCAAATGAAAAAAAAAAAAAAAATAGACCCCAGGCTGGTCCTTGG |
| | AGATAAGGTAATATATTCATTGGGTGAGGGGGTGTGTGTTTTGGAAAATAG |
| | TTAATTTAGTGAGAAATGCTTTTCGGTCAAATGCATCTCAAAGGCTGCTGA |
| | ATTCAAATCGGGTCTGTAAATGCTTACCTAGTGCTTGCTTGCCCTGGGGAC |
| | AGAGACATAAATTACTTTAGTCTCAGATCCACTCGTTCTAACAGATTGGCA |
| | TCTCCATCGTCTGTGGAGCTTTTAATCACTCTGTTTGTATTAGCTAATTAA |
| | TTAGCTAACTTGAGACACACTGATATTTTCTTATTATAAACATGGGTGCCA |
| | TTTGATAAAAGACAATCATTAACAAAATGGTTCGAATTTCCGCTTAAGTGA |
| | TCTTCTTTTTTCCTTTTCATTTTTTTTAACTAGCTAATCAAAGGTAGTTTC |
| | CCAAAAATAAATGCAAAGGGAGTATAAAGAAAAAATTCCCTGTGGTGGGAG |
| | CTAGTATTGAAACAACAGTATCAAAGAGGCTGTTACCTACTGGCCTCAAAT |
| | TTTGGCAGGAACGCCTTTGAAAATGTTAGAACTTTACGGACAGCCTAGAGG |
| | TGCTTTGAAAAGTCTCTGTTGCCAACAAAAGCCATTAATCAGCATGCGGCA |
| | CAGGTTACTCAAATTTTGACCTTGACTGTTTTTTAGATCTGTTACACAGAA |
| | CACAACTTCTGGGCTGTAATCTCTGATGTGGATTTGGTGATTTACTAAGGT |
| | ACCGTGGGAAACAAGGAAAGTGTACTTGTACCACATCGTTTCTCAGTGCAT |
| | GTCAGAGTCTACTCAACAGCAGGGCATGCCAGAGCCTTGGATACATTCCGG |
| | GACAAACTATGTCACTCCTAAGGAAATTCCAAGTGTGTGCCTGTCAAGCAC |
| | TCTGGATCATAGAAGCCCACGAGTTCACTGTGCACAAGGCACAGCCATGGC |
| | CAGCACTCTCTTGCATGGTATTTCTCTTAAGCTCTTACTCAATCACGGTCC |
| | CATGATTGTGACATTGGGGATTAATTGCTTGAGCAGGTTTATTTACAGTCT |
| | GTTCCTTGCAAAATACATGCAGATATGTCTGGCCTCAAAATCCCCTGATTG |
| | TTTTAGGGCTTAGAGAATACTGGGGATGTTTTTGCTGTTTTCAGATGTACT |
| | TTATTTAAGCTTGCAGAATTACCCTGAATATTAACAGTGTTCTAAGATATT |
| | GCCTGCTAGCTTCTGGCTAATTTACTAGTGGTGACAGTATCAGATCAGAGT |
| | ATCTATATTTATGTCTTGCTATTATAGTTAAAACTTCCTGATCTCTGTAAC |
| | ACACTCACCCCTACCTCATCTATCTACCCATCTTGTGGATGTAGCTGTGAG |
| | AAGACTCACAAGCCCGAGTTGCAGTTACTTTTCTGAAGCAACATAGTATGT |
| | TAATGGAATGGCCAGAACTCTACTCTTGGCACATGGCACTGAATTTGATGC |
| | CACTAAAAGAAAAATTGAAGGCAGAAATATTTTTTACTATGCATGGGACAA |
| | CGTAGAAGAGCAAGGAGACTGCTTACACATGGTGGTCACATCTCTGGCTTC |
| | ATCCCTAAACCAATTTTCTGACCCCAAGTCGATTTTTTTTCATGTAGTTAT |
| | TGTTCATTTTCTGGAAAGAGTCAAGCAAAAAGAGAGTTTTATAGAAACCAT |
| | TGCATCATGGAGGTCAGGGGAGGGATTAAGCCAAAGAATTCCTTCTCCAAA |
| | TCTATAGCCATATGGCCACCCTTTGGTGTACTTCTATTTGATCATGACAAA |
| | CCTGAGAGCCCTGCCCAGAGTTCAGTGGATCCTAATGAACTCCAAGAGTAA |
| | TTCATTCCCTCACCAACTCTAGGGGCTTGGCCAGTGCAGAAAATGTCATGG |
| | GATTTTAAAGTTAACATGAGCTGCTATCCAAACTTATGTCTCTTTAAGAAT |
| | GGAGAGACACAGGCCAGGAGAGGTAACATATGAAGCCTGGTATTGGGCAGT |
| | AGCTTGATGGAGTATTGAGGCTAAAAGTAGACTTCCTGCCCCTGACCATAC |
| | ACAACACCCTTTCAGTTTGATCCATGGTGGTCTTATTCTACTTTATTTTGA |
| | GCACCTGTCACACCTAGTTACTGTCATGCCAAGAAGGTCCATAACAGGCAA |
| | ATCCTACTCTGCTGTGTGCACACAAGAGGAAGGAGGCTCACAGTAGCAAGT |
| | AAACAGATAAGCAAACGTACACGATTTTCGTCTTAAAGTCATTAAGACACA |
| | CGCGTACCCCTCTTTTGTTTCAGAGGGTATACAGGCTGAACAGATGTCAGT |
| | GTTCACCTATTCTTATTGATAAGCCCCATGTGCTTTCATTGGTTGAATGTT |
| | TTATGTTAAAACGTCATATTGCCATCGTAAAATGCATATTGTATGTTGTTG |
| | GGTATATAATTAACTAATATGCATCGCATGTATGAATTCTAATCTCTGTAA |
| | ATGAAAACTTATATATGTTAACATATGTAATAGTTATAATTTAATAAACTG |
| | ACACTGGAGACTAC (SEQ ID NO: 135) |
| | >NP_796345.4 tumor necrosis factor ligand superfamily |
| | member 15 [Mus musculus] |
| | MAEELGLGFGEGVPVEVLPEGCRHRPEARAGLAARSKACLALTCCLLSFPI |
| | LAGLSTLLMAGQLRVPGKDCMLRAITEERSEPSPQQVYSPPRGKPRAHLTI |
| | KKQTPAPHLKNQLSALHWEHDLGMAFTKNGMKYINKSLVIPESGDYFIYSQ |
| | ITFRGTTSVCGDISRGRRPNKPDSITMVITKVADSYPEPARLLTGSKSVCE |
| | ISNNWFQSLYLGATFSLEEGDRLMVNVSDISLVDYTKEDKTFFGAFLL |
| | (SEQ ID NO: 136) |
| Human CD80 | >NM_005191.4 Homo sapiens CD80 molecule (CD80), mRNA |
| | AAACCCTCTGTAAAGTAACAGAAGTTAGAAGGGGAAATGTCGCCTCTCTGA |
| | AGATTACCCAAAGAAAAAGTGATTTGTCATTGCTTTATAGACTGTAAGAAG |
| | AGAACATCTCAGAAGTGGAGTCTTACCCTGAAATCAAAGGATTTAAAGAAA |
| | AAGTGGAATTTTTCTTCAGCAAGCTGTGAAACTAAATCCACAACCTTTGGA |
| | GACCCAGGAACACCCTCCAATCTCTGTGTGTTTTGTAAACATCACTGGAGG |
| | GTCTTCTACGTGAGCAATTGGATTGTCATCAGCCCTGCCTGTTTTGCACCT |
| | GGGAAGTGCCCTGGTCTTACTTGGGTCCAAATTGTTGGCTTTCACTTTTGA |
| | CCCTAAGCATCTGAAGCCATGGGCCACACACGGAGGCAGGGAACATCACCA |
| | TCCAAGTGTCCATACCTCAATTTCTTTCAGCTCTTGGTGCTGGCTGGTCTT |
| | TCTCACTTCTGTTCAGGTGTTATCCACGTGACCAAGGAAGTGAAAGAAGTG |
| | GCAACGCTGTCCTGTGGTCACAATGTTTCTGTTGAAGAGCTGGCACAAACT |
| | CGCATCTACTGGCAAAAGGAGAAGAAAATGGTGCTGACTATGATGTCTGGG |
| | GACATGAATATATGGCCCGAGTACAAGAACCGGACCATCTTTGATATCACT |
| | AATAACCTCTCCATTGTGATCCTGGCTCTGCGCCCATCTGACGAGGGCACA |
| | TACGAGTGTGTTGTTCTGAAGTATGAAAAAGACGCTTTCAAGCGGGAACAC |
| | CTGGCTGAAGTGACGTTATCAGTCAAAGCTGACTTCCCTACACCTAGTATA |
| | TCTGACTTTGAAATTCCAACTTCTAATATTAGAAGGATAATTTGCTCAACC |
| | TCTGGAGGTTTTCCAGAGCCTCACCTCTCCTGGTTGGAAAATGGAGAAGAA |
| | TTAAATGCCATCAACACAACAGTTTCCCAAGATCCTGAAACTGAGCTCTAT |
| | GCTGTTAGCAGCAAACTGGATTTCAATATGACAACCAACCACAGCTTCATG |
| | TGTCTCATCAAGTATGGACATTTAAGAGTGAATCAGACCTTCAACTGGAAT |
| | ACAACCAAGCAAGAGCATTTTCCTGATAACCTGCTCCCATCCTGGGCCATT |
| | ACCTTAATCTCAGTAAATGGAATTTTTGTGATATGCTGCCTGACCTACTGC |
| | TTTGCCCCAAGATGCAGAGAGAGAAGGAGGAATGAGAGATTGAGAAGGGAA |
| | AGTGTACGCCCTGTATAACAGTGTCCGCAGAAGCAAGGGGCTGAAAAGATC |
| | TGAAGGTCCCACCTCCATTTGCAATTGACCTCTTCTGGGAACTTCCTCAGA |
| | TGGACAAGATTACCCCACCTTGCCCTTTACGTATCTGCTCTTAGGTGCTTC |
| | TTCACTTCAGTTGCTTTGCAGGAAGTGTCTAGAGGAATATGGTGGGCACAG |
| | AAGTAGCTCTGGTGACCTTGATCAAGGTGTTTTGAAATGCAGAATTCTTGA |
| | GTTCTGGAAGGGACTTTAGAGAATACCAGTGTTATTAATGACAAAGGCACT |
| | GAGGCCCAGGGAGGTGACCCGAATTATAAAGGCCAGCGCCAGAACCCAGAT |
| | TTCCTAACTCTGGTGCTCTTTCCCTTTATCAGTTTGACTGTGGCCTGTTAA |
| | CTGGTATATACATATATATGTCAGGCAAAGTGCTGCTGGAAGTAGAATTTG |
| | TCCAATAACAGGTCAACTTCAGAGACTATCTGATTTCCTAATGTCAGAGTA |
| | GAAGATTTTATGCTGCTGTTTACAAAAGCCCAATGTAATGCATAGGAAGTA |
| | TGGCATGAACATCTTTAGGAGACTAATGGAAATATTATTGGTGTTTACCCA |
| | GTATTCCATTTTTTTCATTGTGTTCTCTATTGCTGCTCTCTCACTCCCCCA |
| | TGAGGTACAGCAGAAAGGAGAACTATCCAAAACTAATTTCCTCTGACATGT |
| | AAGACGAATGATTTAGGTACGTCAAAGCAGTAGTCAAGGAGGAAAGGGATA |
| | GTCCAAAGACTTAACTGGTTCATATTGGACTGATAATCTCTTTAAATGGCT |
| | TTATGCTAGTTTGACCTCATTTGTAAAATATTTATGAGAAAGTTCTCATTT |
| | AAAATGAGATCGTTGTTTACAGTGTATGTACTAAGCAGTAAGCTATCTTCA |
| | AATGTCTAAGGTAGTAACTTTCCATAGGGCCTCCTTAGATCCCTAAGATGG |
| | CTTTTTCTCCTTGGTATTTCTGGGTCTTTCTGACATCAGCAGAGAACTGGA |
| | AAGACATAGCCAACTGCTGTTCATGTTACTCATGACTCCTTTCTCTAAAAC |
| | TGCCTTCCACAATTCACTAGACCAGAAGTGGACGCAACTTAAGCTGGGATA |
| | ATCACATTATCATCTGAAAATCTGGAGTTGAACAGCAAAAGAAGACAACAT |
| | TTCTCAAATGCACATCTCATGGCAGCTAAGCCACATGGCTGGGATTTAAAG |
| | CCTTTAGAGCCAGCCCATGGCTTTAGCTACCTCACTATGCTGCTTCACAAA |
| | CCTTGCTCCTGTGTAAAACTATATTCTCAGTGTAGGGCAGAGAGGTCTAAC |
| | ACCAACATAAGGTACTAGCAGTGTTTCCCGTATTGACAGGAATACTTAACT |
| | CAATAATTCTTTTCTTTTCCATTTAGTAACAGTTGTGATGACTATGTTTCT |
| | ATTCTAAGTAATTCCTGTATTCTACAGCAGATACTTTGTCAGCAATACTAA |
| | GGGAAGAAACAAAGTTGAACCGTTTCTTTAATAA (SEQ ID NO: 137) |
| | >NP_005182.1 T-lymphocyte activation antigen CD80 |
| | precursor [Homo sapiens] |
| | MGHTRRQGTSPSKCPYLNFFQLLVLAGLSHFCSGVIHVTKEVKEVATLSCG |
| | HNVSVEELAQTRIYWQKEKKMVLTMMSGDMNIWPEYKNRTIFDITNNLSIV |
| | ILALRPSDEGTYECVVLKYEKDAFKREHLAEVTLSVKADFPTPSISDFEIP |
| | TSNIRRIICSTSGGFPEPHLSWLENGEELNAINTTVSQDPETELYAVSSKL |
| | DFNMTTNHSFMCLIKYGHLRVNQTFNWNTTKQEHFPDNLLPSWAITLISVN |
| | GIFVICCLTYCFAPRCRERRRNERLRRESVRPV (SEQ ID NO: 138) |
| Mouse CD80 | >NM_009855.2 Mus musculus CD80 antigen (Cd80), |
| | transcript variant 2, mRNA |
| | GAGTTTTATACCTCAATAGACTCTTACTAGTTTCTCTTTTTCAGGTTGTGA |
| | AACTCAACCTTCAAAGACACTCTGTTCCATTTCTGTGGACTAATAGGATCA |
| | TCTTTAGCATCTGCCGGGTGGATGCCATCCAGGCTTCTTTTTCTACATCTC |
| | TGTTTCTCGATTTTTGTGAGCCTAGGAGGTGCCTAAGCTCCATTGGCTCTA |
| | GATTCCTGGCTTTCCCCATCATGTTCTCCAAAGCATCTGAAGCTATGGCTT |
| | GCAATTGTCAGTTGATGCAGGATACACCACTCCTCAAGTTTCCATGTCCAA |
| | GGCTCATTCTTCTCTTTGTGCTGCTGATTCGTCTTTCACAAGTGTCTTCAG |
| | ATGTTGATGAACAACTGTCCAAGTCAGTGAAAGATAAGGTATTGCTGCCTT |
| | GCCGTTACAACTCTCCTCATGAAGATGAGTCTGAAGACCGAATCTACTGGC |
| | AAAAACATGACAAAGTGGTGCTGTCTGTCATTGCTGGGAAACTAAAAGTGT |
| | GGCCCGAGTATAAGAACCGGACTTTATATGACAACACTACCTACTCTCTTA |
| | TCATCCTGGGCCTGGTCCTTTCAGACCGGGGCACATACAGCTGTGTCGTTC |
| | AAAAGAAGGAAAGAGGAACGTATGAAGTTAAACACTTGGCTTTAGTAAAGT |
| | TGTCCATCAAAGCTGACTTCTCTACCCCCAACATAACTGAGTCTGGAAACC |
| | CATCTGCAGACACTAAAAGGATTACCTGCTTTGCTTCCGGGGGTTTCCCAA |
| | AGCCTCGCTTCTCTTGGTTGGAAAATGGAAGAGAATTACCTGGCATCAATA |
| | CGACAATTTCCCAGGATCCTGAATCTGAATTGTACACCATTAGTAGCCAAC |
| | TAGATTTCAATACGACTCGCAACCACACCATTAAGTGTCTCATTAAATATG |
| | GAGATGCTCACGTGTCAGAGGACTTCACCTGGGAAAAACCCCCAGAAGACC |
| | CTCCTGATAGCAAGAACACACTTGTGCTCTTTGGGGCAGGATTCGGCGCAG |
| | TAATAACAGTCGTCGTCATCGTTGTCATCATCAAATGCTTCTGTAAGCACA |
| | GAAGCTGTTTCAGAAGAAATGAGGCAAGCAGAGAAACAAACAACAGCCTTA |
| | CCTTCGGGCCTGAAGAAGCATTAGCTGAACAGACCGTCTTCCTTTAGTTCT |
| | TCTCTGTCCATGTGGGATACATGGTATTATGTGGCTCATGAGGTACAATCT |
| | TTCTTTCAGCACCGTGCTAGCTGATCTTTCGGACAACTTGACACAAGATAG |
| | AGTTAACTGGGAAGAGAAAGCCTTGAATGAGGATTTCTTTCCATCAGGAAG |
| | CCTACGGGCAAGTTTGCTGGGCCTTTGATTGCTTGATGACTGAAGTGGAAA |
| | GGCTGAGCCCACTGTGGGTGGTGCTAGCCCTGGGCAGGGGCAGGTGACCCT |
| | GGGTGGTATAAGAAAAAGAGCTGTCACTAAAAGGAGAGGTGCCTAGTCTTA |
| | CTGCAACTTGATATGTCATGTTTGGTTGGTGTCTGTGGGAGGCCTGCCCTT |
| | TTCTGAAGAGAAGTGGTGGGAGAGTGGATGGGGTGGGGGCAGAGGAAAAGT |
| | GGGGGAGAGGGCCTGGGAGGAGAGGAGGGAGGGGGACGGGGTGGGGGTGGG |
| | GAAAACTATGGTTGGGATGTAAAAACGATAATAATATAAATATTAAATAAA |
| | AAGAGAGTATTGAGCAAA (SEQ ID NO: 139) |
| | >NP_033985.3 T-lymphocyte activation antigen CD80 |
| | precursor [Mus musculus] |
| | MACNCQLMQDTPLLKFPCPRLILLFVLLIRLSQVSSDVDEQLSKSVKDKVL |
| | LPCRYNSPHEDESEDRIYWQKHDKVVLSVIAGKLKVWPEYKNRTLYDNTTY |
| | SLIILGLVLSDRGTYSCVVQKKERGTYEVKHLALVKLSIKADFSTPNITES |
| | GNPSADTKRITCFASGGFPKPRFSWLENGRELPGINTTISQDPESELYTIS |
| | SQLDFNTTRNHTIKCLIKYGDAHVSEDFTWEKPPEDPPDSKNTLVLFGAGF |
| | GAVITVVVIVVIIKCFCKHRSCFRRNEASRETNNSLTFGPEEALAEQTVFL |
| | (SEQ ID NO: 140) |
| Human CD86 | >NM_175862.5 Homo sapiens CD86 molecule (CD86), |
| | transcript variant 1, mRNA |
| | AGTCATTGCCGAGGAAGGCTTGCACAGGGTGAAAGCTTTGCTTCTCTGCTG |
| | CTGTAACAGGGACTAGCACAGACACACGGATGAGTGGGGTCATTTCCAGAT |
| | ATTAGGTCACAGCAGAAGCAGCCAAAATGGATCCCCAGTGCACTATGGGAC |
| | TGAGTAACATTCTCTTTGTGATGGCCTTCCTGCTCTCTGGTGCTGCTCCTC |
| | TGAAGATTCAAGCTTATTTCAATGAGACTGCAGACCTGCCATGCCAATTTG |
| | CAAACTCTCAAAACCAAAGCCTGAGTGAGCTAGTAGTATTTTGGCAGGACC |
| | AGGAAAACTTGGTTCTGAATGAGGTATACTTAGGCAAAGAGAAATTTGACA |
| | GTGTTCATTCCAAGTATATGGGCCGCACAAGTTTTGATTCGGACAGTTGGA |
| | CCCTGAGACTTCACAATCTTCAGATCAAGGACAAGGGCTTGTATCAATGTA |
| | TCATCCATCACAAAAAGCCCACAGGAATGATTCGCATCCACCAGATGAATT |
| | CTGAACTGTCAGTGCTTGCTAACTTCAGTCAACCTGAAATAGTACCAATTT |
| | CTAATATAACAGAAAATGTGTACATAAATTTGACCTGCTCATCTATACACG |
| | GTTACCCAGAACCTAAGAAGATGAGTGTTTTGCTAAGAACCAAGAATTCAA |
| | CTATCGAGTATGATGGTGTTATGCAGAAATCTCAAGATAATGTCACAGAAC |
| | TGTACGACGTTTCCATCAGCTTGTCTGTTTCATTCCCTGATGTTACGAGCA |
| | ATATGACCATCTTCTGTATTCTGGAAACTGACAAGACGCGGCTTTTATCTT |
| | CACCTTTCTCTATAGAGCTTGAGGACCCTCAGCCTCCCCCAGACCACATTC |
| | CTTGGATTACAGCTGTACTTCCAACAGTTATTATATGTGTGATGGTTTTCT |
| | GTCTAATTCTATGGAAATGGAAGAAGAAGAAGCGGCCTCGCAACTCTTATA |
| | AATGTGGAACCAACACAATGGAGAGGGAAGAGAGTGAACAGACCAAGAAAA |
| | GAGAAAAAATCCATATACCTGAAAGATCTGATGAAGCCCAGCGTGTTTTTA |
| | AAAGTTCGAAGACATCTTCATGCGACAAAAGTGATACATGTTTTTAATTAA |
| | AGAGTAAAGCCCATACAAGTATTCATTTTTTCTACCCTTTCCTTTGTAAGT |
| | TCCTGGGCAACCTTTTTGATTTCTTCCAGAAGGCAAAAAGACATTACCATG |
| | AGTAATAAGGGGGCTCCAGGACTCCCTCTAAGTGGAATAGCCTCCCTGTAA |
| | CTCCAGCTCTGCTCCGTATGCCAAGAGGAGACTTTAATTCTCTTACTGCTT |
| | CTTTTCACTTCAGAGCACACTTATGGGCCAAGCCCAGCTTAATGGCTCATG |
| | ACCTGGAAATAAAATTTAGGACCAATACCTCCTCCAGATCAGATTCTTCTC |
| | TTAATTTCATAGATTGTGTTTTTTTTTTAAATAGACCTCTCAATTTCTGGA |
| | AAACTGCCTTTTATCTGCCCAGAATTCTAAGCTGGTGCCCCACTGAATTTT |
| | GTGTGTACCTGTGACTAAACAACTACCTCCTCAGTCTGGGTGGGACTTATG |
| | TATTTATGACCTTATAGTGTTAATATCTTGAAACATAGAGATCTATGTACT |
| | GTAATAGTGTGATTACTATGCTCTAGAGAAAAGTCTACCCCTGCTAAGGAG |
| | TTCTCATCCCTCTGTCAGGGTCAGTAAGGAAAACGGTGGCCTAGGGTACAG |
| | GCAACAATGAGCAGACCAACCTAAATTTGGGGAAATTAGGAGAGGCAGAGA |
| | TAGAACCTGGAGCCACTTCTATCTGGGCTGTTGCTAATATTGAGGAGGCTT |
| | GCCCCACCCAACAAGCCATAGTGGAGAGAACTGAATAAACAGGAAAATGCC |
| | AGAGCTTGTGAACCCTGTTTCTCTTGAAGAACTGACTAGTGAGATGGCCTG |
| | GGGAAGCTGTGAAAGAACCAAAAGAGATCACAATACTCAAAAGAGAGAGAG |
| | AGAGAAAAAAGAGAGATCTTGATCCACAGAAATACATGAAATGTCTGGTCT |
| | GTCCACCCCATCAACAAGTCTTGAAACAAGCAACAGATGGATAGTCTGTCC |
| | AAATGGACATAAGACAGACAGCAGTTTCCCTGGTGGTCAGGGAGGGGTTTT |
| | GGTGATACCCAAGTTATTGGGATGTCATCTTCCTGGAAGCAGAGCTGGGGA |
| | GGGAGAGCCATCACCTTGATAATGGGATGAATGGAAGGAGGCTTAGGACTT |
| | TCCACTCCTGGCTGAGAGAGGAAGAGCTGCAACGGAATTAGGAAGACCAAG |
| | ACACAGATCACCCGGGGCTTACTTAGCCTACAGATGTCCTACGGGAACGTG |
| | GGCTGGCCCAGCATAGGGCTAGCAAATTTGAGTTGGATGATTGTTTTTGCT |
| | CAAGGCAACCAGAGGAAACTTGCATACAGAGACAGATATACTGGGAGAAAT |
| | GACTTTGAAAACCTGGCTCTAAGGTGGGATCACTAAGGGATGGGGCAGTCT |
| | CTGCCCAAACATAAAGAGAACTCTGGGGAGCCTGAGCCACAAAAATGTTCC |
| | TTTATTTTATGTAAACCCTCAAGGGTTATAGACTGCCATGCTAGACAAGCT |
| | TGTCCATGTAATATTCCCATGTTTTTACCCTGCCCCTGCCTTGATTAGACT |
| | CCTAGCACCTGGCTAGTTTCTAACATGTTTTGTGCAGCACAGTTTTTAATA |
| | AATGCTTGTTACATTCA (SEQ ID NO: 141) |
| | >NP_787058.5 T-lymphocyte activation antigen CD86 |
| | isoform 1 precursor [Homo sapiens] |
| | MDPQCTMGLSNILFVMAFLLSGAAPLKIQAYFNETADLPCQFANSQNQSLS |
| | ELVVFWQDQENLVLNEVYLGKEKFDSVHSKYMGRTSFDSDSWTLRLHNLQI |
| | KDKGLYQCIIHHKKPTGMIRIHQMNSELSVLANFSQPEIVPISNITENVYI |
| | NLTCSSIHGYPEPKKMSVLLRTKNSTIEYDGVMQKSQDNVTELYDVSISLS |
| | VSFPDVTSNMTIFCILETDKTRLLSSPFSIELEDPQPPPDHIPWITAVLPT |
| | VIICVMVFCLILWKWKKKKRPRNSYKCGTNTMEREESEQTKKREKIHIPER |
| | SDEAQRVFKSSKTSSCDKSDTCF (SEQ ID NO: 142) |
| Mouse CD86 | >NM_019388.3 Mus musculus CD86 antigen (Cd86), mRNA |
| | ATTGCTGAGGAAGAAAGAGGAGCAAGCAGACGCGTAAGAGTGGCTCCTGTA |
| | GGCAGCACGGACTTGAACAACCAGACTCCTGTAGACGTGTTCCAGAACTTA |
| | CGGAAGCACCCACGATGGACCCCAGATGCACCATGGGCTTGGCAATCCTTA |
| | TCTTTGTGACAGTCTTGCTGATCTCAGATGCTGTTTCCGTGGAGACGCAAG |
| | CTTATTTCAATGGGACTGCATATCTGCCGTGCCCATTTACAAAGGCTCAAA |
| | ACATAAGCCTGAGTGAGCTGGTAGTATTTTGGCAGGACCAGCAAAAGTTGG |
| | TTCTGTACGAGCACTATTTGGGCACAGAGAAACTTGATAGTGTGAATGCCA |
| | AGTACCTGGGCCGCACGAGCTTTGACAGGAACAACTGGACTCTACGACTTC |
| | ACAATGTTCAGATCAAGGACATGGGCTCGTATGATTGTTTTATACAAAAAA |
| | AGCCACCCACAGGATCAATTATCCTCCAACAGACATTAACAGAACTGTCAG |
| | TGATCGCCAACTTCAGTGAACCTGAAATAAAACTGGCTCAGAATGTAACAG |
| | GAAATTCTGGCATAAATTTGACCTGCACGTCTAAGCAAGGTCACCCGAAAC |
| | CTAAGAAGATGTATTTTCTGATAACTAATTCAACTAATGAGTATGGTGATA |
| | ACATGCAGATATCACAAGATAATGTCACAGAACTGTTCAGTATCTCCAACA |
| | GCCTCTCTCTTTCATTCCCGGATGGTGTGTGGCATATGACCGTTGTGTGTG |
| | TTCTGGAAACGGAGTCAATGAAGATTTCCTCCAAACCTCTCAATTTCACTC |
| | AAGAGTTTCCATCTCCTCAAACGTATTGGAAGGAGATTACAGCTTCAGTTA |
| | CTGTGGCCCTCCTCCTTGTGATGCTGCTCATCATTGTATGTCACAAGAAGC |
| | CGAATCAGCCTAGCAGGCCCAGCAACACAGCCTCTAAGTTAGAGCGGGATA |
| | GTAACGCTGACAGAGAGACTATCAACCTGAAGGAACTTGAACCCCAAATTG |
| | CTTCAGCAAAACCAAATGCAGAGTGAAGGCAGTGAGAGCCTGAGGAAAGAG |
| | TTAAAAATTGCTTTGCCTGAAATAAGAAGTGCAGAGTTTCTCAGAATTCAA |
| | AAATGTTCTCAGCTGATTGGAATTCTACAGTTGAATAATTAAAGAACAAAA |
| | TACACAACAGTGTCCATATTTTATCCTGTTTCCTTTCCAAGTTTTTGGGCA |
| | ATGTCAATTGTGTCCCCTATGCCAGGAGCAGACATCTATTTTGTCTTGCTT |
| | TGTTTAACTCAGTGCACACTCATAGGCCAAGAGCACTGAAATGGCTTCTTT |
| | CCCAGGAATAACATTTTGGATCAATCTCTCCTACTTGAGATCAGATTCTTC |
| | TTCTAATTTTGCATAGTGTGTTTTTATATGGAACTCCTTGTTGTAGGAATA |
| | CTGGCTTTTATCTGTCTTGCACACTTGCATACTTATATACTTATACCTGGA |
| | CAGCTACCTCTTCAGTCAGGATGGGAGTGGTATATTTGGTGATGTTATTTG |
| | ATGTGTTCGTGTTGCTATCTTAAAACAGCAAAGAGCATATACTATAGTAGC |
| | TCAACTACAATGATCTAGAGAAAGACCCAGCACTTATAAGAAACACTGTCC |
| | CTCCATCAGGGTCAATAATGAATACAATGACCTAAGTAATATACAGGTGAC |
| | AGCAACAGCACAGAGTTCTCAGTGCTGGCAAATCAAGAAACACAAATATGG |
| | AACCATCTCTAGATCCAAGAGCCACTCCTACCTGGGCTGCCACAGATACTG |
| | GAAGAATCCACCTGCCTGGCCAGCAAGTCACAACTTAGCAGGCAGCACTGA |
| | AGAAAGCAAGATGTACTGTATGCCCTTTTAAGAAAATGCCTGGAAAGGTCT |
| | GGAGAATGCTGTGCAAGGATAAGACAGCCAAGCACTCAAAACCAGGAGACA |
| | TCACTAGAATCCAACCAACAAATGTTTATGGAAGGACTGATCTGCCCAGTC |
| | CATTGAAAAGTCAAGAGGTCAGAGATAGACCAGTGTGTGTCTCAATGGATG |
| | TAGATATCAGCCACCTCGGTGCTCAACAGGTATTTTATGATCTCCTTGTTT |
| | CAAATTCATCTAGATGTAGAACTAGGGAGAGAGCAGTCACATTGATGAAAG |
| | GCTAGGACTCTTTCAGCTCATGGCTTGTGTGGAAGGAGGGAAAGCAGAAAT |
| | CACAACACTCTGAGACTACTGTAGTCTGCAGATACCTGAGTGGGTGTGGCT |
| | TGGCCTTTCAAAGGACAAAGAGCAACTAATGCTGAAAGCACATAGTGTATC |
| | TATACGGCATGGAATAGTCATCACCCAGACTTAAAGAGAACTTTGGCAGGT |
| | CTGAGCAGCAAAATATTGTTGTTTCCATTTTACATAAAGGGCCCTGGAGGG |
| | CTATAGACTATTCCGCTGGCAGGGCTCATGCTTGTAATGTGTCCATCTTGA |
| | TTCACCCTGTGCAGACTCTTAAGATCTGGCCAGTTACCAACATGTTCTGTA |
| | CAGAGTGGATTTCAATAAAGTTTTCTTGAATTTTTTCAAG |
| | (SEQ ID NO: 143) |
| | >NP_062261.3 T-lymphocyte activation antigen CD86 |
| | precursor [Mus musculus] |
| | MDPRCTMGLAILIFVTVLLISDAVSVETQAYFNGTAYLPCPFTKAQNISLS |
| | ELVVFWQDQQKLVLYEHYLGTEKLDSVNAKYLGRTSFDRNNWTLRLHNVQI |
| | KDMGSYDCFIQKKPPTGSIILQQTLTELSVIANFSEPEIKLAQNVTGNSGI |
| | NLTCTSKQGHPKPKKMYFLITNSTNEYGDNMQISQDNVTELFSISNSLSLS |
| | FPDGVWHMTVVCVLETESMKISSKPLNFTQEFPSPQTYWKEITASVTVALL |
| | LVMLLIIVCHKKPNQPSRPSNTASKLERDSNADRETINLKELEPQIASAKP |
| | NAE (SEQ ID NO: 144) |
| Human LFA-3 | >NM_001779.3 Homo sapiens CD58 molecule (CD58), |
| (CD58) | transcript variant 1, mRNA |
| | GAACTTAGGGCTGCTTGTGGCTGGGCACTCGCGCAGAGGCCGGCCCGACGA |
| | GCCATGGTTGCTGGGAGCGACGCGGGGCGGGCCCTGGGGGTCCTCAGCGTG |
| | GTCTGCCTGCTGCACTGCTTTGGTTTCATCAGCTGTTTTTCCCAACAAATA |
| | TATGGTGTTGTGTATGGGAATGTAACTTTCCATGTACCAAGCAATGTGCCT |
| | TTAAAAGAGGTCCTATGGAAAAAACAAAAGGATAAAGTTGCAGAACTGGAA |
| | AATTCTGAATTCAGAGCTTTCTCATCTTTTAAAAATAGGGTTTATTTAGAC |
| | ACTGTGTCAGGTAGCCTCACTATCTACAACTTAACATCATCAGATGAAGAT |
| | GAGTATGAAATGGAATCGCCAAATATTACTGATACCATGAAGTTCTTTCTT |
| | TATGTGCTTGAGTCTCTTCCATCTCCCACACTAACTTGTGCATTGACTAAT |
| | GGAAGCATTGAAGTCCAATGCATGATACCAGAGCATTACAACAGCCATCGA |
| | GGACTTATAATGTACTCATGGGATTGTCCTATGGAGCAATGTAAACGTAAC |
| | TCAACCAGTATATATTTTAAGATGGAAAATGATCTTCCACAAAAAATACAG |
| | TGTACTCTTAGCAATCCATTATTTAATACAACATCATCAATCATTTTGACA |
| | ACCTGTATCCCAAGCAGCGGTCATTCAAGACACAGATATGCACTTATACCC |
| | ATACCATTAGCAGTAATTACAACATGTATTGTGCTGTATATGAATGGTATT |
| | CTGAAATGTGACAGAAAACCAGACAGAACCAACTCCAATTGATTGGTAACA |
| | GAAGATGAAGACAACAGCATAACTAAATTATTTTAAAAACTAAAAAGCCAT |
| | CTGATTTCTCATTTGAGTATTACAATTTTTGAACAACTGTTGGAAATGTAA |
| | CTTGAAGCAGCTGCTTTAAGAAGAAATACCCACTAACAAAGAACAAGCATT |
| | AGTTTTGGCTGTCATCAACTTATTATATGACTAGGTGCTTGCTTTTTTTGT |
| | CAGTAAATTGTTTTTACTGATGATGTAGATACTTTTGTAAATAAATGTAAA |
| | TATGTACACAAGTGA (SEQ ID NO: 145) |
| | >NP_001770.1 lymphocyte function-associated antigen |
| | 3 isoform 1 [Homo sapiens] |
| | MVAGSDAGRALGVLSVVCLLHCFGFISCFSQQIYGVVYGNVTFHVPSNVPL |
| | KEVLWKKQKDKVAELENSEFRAFSSFKNRVYLDTVSGSLTIYNLTSSDEDE |
| | YEMESPNITDTMKFFLYVLESLPSPTLTCALTNGSIEVQCMIPEHYNSHRG |
| | LIMYSWDCPMEQCKRNSTSIYFKMENDLPQKIQCTLSNPLFNTTSSIILTT |
| | CIPSSGHSRHRYALIPIPLAVITTCIVLYMNGILKCDRKPDRTNSN (SEQ |
| | ID NO: 146) |
| Human SLAM | >NM_003037.5 Homo sapiens signaling lymphocytic |
| (CD150) | activation molecule family member 1 (SLA1VIF1), |
| | transcript variant 1, mRNA |
| | AGACAGCCTCTGCTGCATGACACGAAGCTTGCTTCTGCCTGGCATCTGTGA |
| | GCAGCTGCCAGGCTCCGGCCAGGATCCCTTCCTTCTCCTCATTGGCTGATG |
| | GATCCCAAGGGGCTCCTCTCCTTGACCTTCGTGCTGTTTCTCTCCCTGGCT |
| | TTTGGGGCAAGCTACGGAACAGGTGGGCGCATGATGAACTGCCCAAAGATT |
| | CTCCGGCAGTTGGGAAGCAAAGTGCTGCTGCCCCTGACATATGAAAGGATA |
| | AATAAGAGCATGAACAAAAGCATCCACATTGTCGTCACAATGGCAAAATCA |
| | CTGGAGAACAGTGTCGAGAACAAAATAGTGTCTCTTGATCCATCCGAAGCA |
| | GGCCCTCCACGTTATCTAGGAGATCGCTACAAGTTTTATCTGGAGAATCTC |
| | ACCCTGGGGATACGGGAAAGCAGGAAGGAGGATGAGGGATGGTACCTTATG |
| | ACCCTGGAGAAAAATGTTTCAGTTCAGCGCTTTTGCCTGCAGTTGAGGCTT |
| | TATGAGCAGGTCTCCACTCCAGAAATTAAAGTTTTAAACAAGACCCAGGAG |
| | AACGGGACCTGCACCTTGATACTGGGCTGCACAGTGGAGAAGGGGGACCAT |
| | GTGGCTTACAGCTGGAGTGAAAAGGCGGGCACCCACCCACTGAACCCAGCC |
| | AACAGCTCCCACCTCCTGTCCCTCACCCTCGGCCCCCAGCATGCTGACAAT |
| | ATCTACATCTGCACCGTGAGCAACCCTATCAGCAACAATTCCCAGACCTTC |
| | AGCCCGTGGCCCGGATGCAGGACAGACCCCTCAGAAACAAAACCATGGGCA |
| | GTGTATGCTGGGCTGTTAGGGGGTGTCATCATGATTCTCATCATGGTGGTA |
| | ATACTACAGTTGAGAAGAAGAGGTAAAACGAACCATTACCAGACAACAGTG |
| | GAAAAAAAAAGCCTTACGATCTATGCCCAAGTCCAGAAACCAGGTCCTCTT |
| | CAGAAGAAACTTGACTCCTTCCCAGCTCAGGACCCTTGCACCACCATATAT |
| | GTTGCTGCCACAGAGCCTGTCCCAGAGTCTGTCCAGGAAACAAATTCCATC |
| | ACAGTCTATGCTAGTGTGACACTTCCAGAGAGCTGACACCAGAGACCAACA |
| | AAGGGACTTTCTGAAGGAAAATGGAAAAACCAAAATGAACACTGAACTTGG |
| | CCACAGGCCCCAAGTTTCCTCTGGCAGACATGCTGCACGTCTGTACCCTTC |
| | TCAGATCAACTCCCTGGTGATGTTTCTTCCACATACATCTGTGAAATGAAC |
| | AAGGAAGTGAGGCTTCCCAAGAATTTAGCTTGCTGTGCAGTGGCTGCAGGC |
| | GCAGAACAGAGCGTTACTTGATAACAGCGTTCCATCTTTGTGTTGTAGCAG |
| | ATGAAATGGACAGTAATGTGAGTTCAGACTTTGGGCATCTTGCTCTTGGCT |
| | GGAACTGGATAATAAAAATCAGACTGAAAGCCAGGACATCTGAGTACCTAT |
| | CTCACACACTGGACCACCAGTCACAAAGTCTGGAAAAGTTTACATTTTGGC |
| | TATCTTTACTTTGTTCTGGGAGCTGATCATGATAACCTGCAGACCTGATCA |
| | AGCCTCTGTGCCTCAGTTTCTCTCTCAGGATAAAGAGTGAATAGAGGCTGA |
| | AGGGTGAATTTCTTATTATACATAAAACACTCTGATATTATTGTATAAAGG |
| | AAGCTAAGAATATTATTTTATTTGCAAAACCCAGAAGCTAAAAAGTCAATA |
| | AACAGAAAGAATGATTTTGAGATCTCTGAGTTTTGAACAGTGGACTGGAAA |
| | CCATGTAAGAGCCTTAAAAGTACAGTTCTGTGCAAATGGCATTCAGTTTTA |
| | AAGAAAAACGTAGCAAATGTTTGATGGTGCTGTTACAAAGGAGCTTGGAAT |
| | ACTCAGAGGAACTTGTCCCATGGTGATTTTTCACTTCTCAAAATGATGTTT |
| | AAATCCCAGTTCTCTGTTGATTCCCTTGAACAACAAACCTGGAACCTCAGC |
| | TAAGACTCTCTGTGACCAGATTCTGAACCTCTTATATCCAGGGCTTCAAGG |
| | GGTATTGCAGGTCAAGGTCTTTCCTAGGCACTTTCTACTCCCTGCATACCT |
| | CTCCTCACACTAAATTTATCCTCTAGTAGAAAATTAAGTTATTTTGGTCTA |
| | ACAGCTTCAAATCTTTGAATGCTCAATAACTTATTTTGCAAGCTGCAGGCA |
| | GAAAGAGACTTTTTAAGTAAAGTCCTTTGTTTTTTCCTATTCTCTGCTTTT |
| | AGACAGGCTGTCCTCAATTTAAGCCCTGCTTTTTCTTATTGTTTCTTATAT |
| | AAACTTGGTAAGTACTGTAAGAAACAGCCACTATCATACCATTGCATAATA |
| | AGGAGCACCAACTTCCCAGCTCAAAACTCAGGTCCTTATTGCCTTGTATCT |
| | TACCTCCTCTATGAGGTCAATTCACATTGTAAGCCTGTTGCTTAGTGCATC |
| | TCGTTTCCTGGTACCAGCTTCTTTAATAGAGTTCTTAGTTGCAATCAACAG |
| | AAGCTGGCTTTGGCTTTTTTATGTAGAAAAGGAACCTATTGAAAAGATACT |
| | GATTGGTTCCAATAACTGCTAGAAGTTTCTGCAAAACCATGCTTTGAAAGT |
| | GAGCAGGAAAAGAAGAGACTAGGCTGTGGCTGGGAGCACAGCCAAAATTAC |
| | AAAACCAGCCCAGGGATGATGATCCTGTTCATGCACAGCCACTGTCCCCAG |
| | CACTAGGCACAGACTCTACCACTGCCTCACTGTCTCTGCTGGACTTGGAAA |
| | CTTGATATTACTGTTACTGCTGCACTGTCTGCCATGAAAATGAATTCTCCA |
| | GGGTCCCTTCTTCATCCTTTCATCTCTAGCTTATAATTCAAAGTCTGGGAT |
| | TGAGTGGCCAATCCTAGGTCACATGTCCATGTCCTATCTCCAAGGGGGGCT |
| | GGGAATTGAATATCTGGCATTTTCCACTTTCACTTCTTATGAATTAAGGAA |
| | TTCTACAAATAATAGAAGTGGGATTCAGGTGGTAGGCAGACAAAAAAGCCT |
| | CACAATTATCCACTACGCCACCCTTGTATAACCTTACCCTCATTCACTGTC |
| | TACTCTCAAAACTGTGGAGCTACTAATGAAGATTTGTAAACCCGGGCTTAT |
| | GAGCACCCATTCCTTTACTACAACTCAGATTGCTCTAGAAGCTCAGTTCCC |
| | AGCACTTGGATTTTTCCAGTAGCTGAATTCTACCTGAAGGAAGGGCAGAAA |
| | CAAAGGGTGAAGAAGAGGCTATCACTTCCAAGTATCCTGCACCCCTGGGCT |
| | CAAGACCTCACTGGGGAGGGAGTCTTTTGGGCCACCCACCAAACAGCACTG |
| | GCATTATGCCTCTCACCCTAGACCATGGTTACACGTGGTAAAACAACCCCT |
| | TCTGGTGATACATTCACAACTCTCTAGTTTCCCCCAAATGGCACTATGGGG |
| | AGCGGGAGCTTGCCTTTTCCTCAGACTTAAAACAATAAGTTTTCCCCGTGT |
| | TTCCCCTCTAATGCTGTTTTCTTTTGACCAAGCATGTCTGAATTCTAGAGA |
| | AGTCAGGAGGAACACACCCATTCTCGGTTTGAAGGGACTGATGTTCTGAAG |
| | TACAACTGGGCACAGTCCCAGGCTCTTCAGGACGCTTCCTCCATTCACACA |
| | GCGGGGATGTGATTGTTACAGCGGGTGGTGTGTGCTGGCTGAGAAGCCACT |
| | GTGAATTGATTCTTCTTCTGAAGTTTATGTTTCTACTTTTTGGAAATGAAT |
| | AAATTACAGCCAGTCCATCAAGGAAA (SEQ ID NO: 14 7 ) |
| | >NP_003028.1 signaling lymphocytic activation |
| | molecule isoform b precursor [Homo sapiens] |
| | MDPKGLLSLTFVLFLSLAFGASYGTGGRMMNCPKILRQLGSKVLLPLTYER |
| | INKSMNKSIHIVVTMAKSLENSVENKIVSLDPSEAGPPRYLGDRYKFYLEN |
| | LTLGIRESRKEDEGWYLMTLEKNVSVQRFCLQLRLYEQVSTPEIKVLNKTQ |
| | ENGTCTLILGCTVEKGDHVAYSWSEKAGTHPLNPANSSHLLSLTLGPQHAD |
| | NIYICTVSNPISNNSQTFSPWPGCRTDPSETKPWAVYAGLLGGVIMILIMV |
| | VILQLRRRGKTNHYQTTVEKKSLTIYAQVQKPGPLQKKLDSFPAQDPCTTI |
| | YVAATEPVPESVQETNSITVYASVTLPES (SEQ ID NO: 148) |
| Mouse SLAM | >NM_013730.4 Mus musculus signaling lymphocytic |
| (CD150) | activation molecule family member 1 (Slamf1), |
| | transcript variant 1, mRNA |
| | GAGCTTCTTCCTTGGGGGTAACAGTAAGCAGCTGTCCTGCCGAGCTGAGCT |
| | GAGCTGAGCTCACAGCTGGGGACCCTGTCTGCGATTGCTGGCTAATGGATC |
| | CCAAAGGATCCCTTTCCTGGAGAATACTTCTGTTTCTCTCCCTGGCTTTTG |
| | AGTTGAGCTACGGAACAGGTGGAGGTGTGATGGATTGCCCAGTGATTCTCC |
| | AGAAGCTGGGACAGGACACGTGGCTGCCCCTGACGAATGAACATCAGATAA |
| | ATAAGAGCGTGAACAAAAGTGTCCGCATCCTCGTCACCATGGCGACGTCCC |
| | CAGGAAGCAAATCCAACAAGAAAATTGTGTCTTTTGATCTCTCTAAAGGGA |
| | GCTATCCAGATCACCTGGAGGATGGCTACCACTTTCAATCAAAAAACCTGA |
| | GCCTGAAGATCCTCGGGAACAGGCGGGAGAGTGAAGGATGGTACTTGGTGA |
| | GCGTGGAGGAGAACGTTTCTGTTCAGCAATTCTGCAAGCAGCTGAAGCTTT |
| | ATGAACAGGTCTCCCCTCCAGAGATTAAAGTGCTAAACAAAACCCAGGAGA |
| | ACGAGAATGGGACCTGCAGCTTGCTGTTGGCCTGCACAGTGAAGAAAGGGG |
| | ACCATGTGACTTACAGCTGGAGTGATGAGGCAGGCACCCACCTGCTGAGCC |
| | GAGCCAACCGCTCCCACCTCCTGCACATCACTCTTAGCAACCAGCATCAAG |
| | ACAGCATCTACAACTGCACCGCAAGCAACCCTGTCAGCAGTATCTCTAGGA |
| | CCTTCAACCTATCATCGCAAGCATGCAAGCAGGAATCCTCCTCAGAATCGA |
| | GTCCATGGATGCAATATACTCTTGTACCACTGGGGGTCGTTATAATCTTCA |
| | TCCTGGTTTTCACGGCAATAATAATGATGAAAAGACAAGGTAAATCAAATC |
| | ACTGCCAGCCACCAGTGGAAGAAAAAAGCCTTACTATTTATGCCCAAGTAC |
| | AGAAATCAGGGCCTCAAGAGAAGAAACTTCATGATGCCCTAACAGATCAGG |
| | ACCCCTGCACAACCATTTATGTGGCTGCCACAGAGCCTGCCCCAGAGTCTG |
| | TCCAGGAACCAAACCCCACCACAGTTTATGCCAGTGTGACACTGCCAGAGA |
| | GCTGACCCATATACCCAGTGAAAGGACTTTTTGAAGGAGGATAGAAGAACC |
| | AAAATCCACACTGAACTGGACCCCGGGTCCCAAGTTCTCTGTGACAGAAAC |
| | TGCACATCTGTAACCTTCTCCAATCAGTTCCCTGGTGACGGATCTGCACAG |
| | GCGTGCTTATGAAGTAGATGAGAAGTGAGGCTTCCTGGGCATGCAACCTGC |
| | TCTGCTGCTGACACAGATATGAAGCAGAGATCCCGTGGTACAGTGTACCAT |
| | CTTTGCTGTAGCAGATAATGTGGGTTTAGGCATCTCACTCTTTGCTGGACT |
| | GGATAACAGAACTCAAAAAAAAACCAACAAGCCAAAGACATAGACTCCATC |
| | TCAGATGGCTGAGCACAAAGTATAAAAGCCATTTTGGCTCTCTGGACTTTA |
| | TTCTGGAAGCTGATCCTGATCACCTCAAGGCCAAGGGCTCCATGCCTCAGT |
| | TTCTCTCTCACCCTCTAGATGAAGAGGGAACAAAGCATAAAGAGTGAAATC |
| | CTTGTTGTCTGAGATCATTCTATAAACGAACTGACATTTTATTTGCAAAAC |
| | TCAAGCTAGTAATTCAGTAGACTTGAAGATGATTTTAGAGCCTCTTATGCT |
| | TCAAACAACAGAATGAAATCCATCCAATGTTCTTCAAAGTGTGGTTCTCTG |
| | ATTAAGTCAAAGCAACACTGTTTGGCAATGCTGCTGTAAAGTTGCCTGGAA |
| | TACTCAGAGGAACTTGTCCCAGGGAGGTTTTTTTCACTTCTTCAAAGAACT |
| | TTTGAATTTAAGTTCTCTGTTTATTCCCTTGAGCAAAACTCTGGAACCTCA |
| | AGAGTCTCTCTCCGTTGGTTCTGAGGCCATTTTATAGCCTAGGCCTCCTGT |
| | GGATCTACATGTGTATCACCCACTTCCTATCTCACTGCATACCTCTGTGTA |
| | GTAGTAAATTTAACCTCAAGTAGAAAATTAAATTATTTTGGATGATCAGTT |
| | CCAAATGATTAGATGTTTAGTCTCTTATAATAGGATGTAGGTAGAGTCTAT |
| | ATAAAGTCCTATATTCTTCACGTTGTCTGTCCTCAGAGAGACCATCTTTCA |
| | ACCTATCTTCCTTCTTGCACAACTTTGGCAAATACTTTAAAAATAACCATT |
| | GTGGAGATGGGGAGAGGTCTAAATGGATAATAGTACTTGCTTTGCAAACAT |
| | GAAGATCTGGGTTCAAACTCCCAGTGTCCATGTAAAAAGATAAGTGTGGTT |
| | GAGTGTGCCAGTAACATAGACACAGATAGGTCCTGAGACTTTGCTCCCTAG |
| | CCTTCCCAGCCAGGCATAAATGTCAAGTCCCCTGAGAGTGACAGAGGAAGA |
| | TACTCCCCCCACACACACACACATACACGCACAGTGATACACATATACATG |
| | CATACAAAAAAAAAACTTATTGTAACAAAGAACACCAACTGCCTGGCTCAA |
| | AACTCTCATGTCCCATTACTCTGTACCTTTCTGTATTTAGATAATTTACAG |
| | TGTGAGTTCTGCTGTTCCATGTATCCTATTTGTGTTACTAACTTATGTCAA |
| | AGTATTTCTAATTATAATCAACAAAAGCTAACTTTG (SEQ ID NO: 149) |
| | >NP_038758.2 signaling lymphocytic activation |
| | molecule isoform 1 precursor [Mus musculus] |
| | MDPKGSLSWRILLFLSLAFELSYGTGGGVMDCPVILQKLGQDTWLPLTNEH |
| | QINKSVNKSVRILVTMATSPGSKSNKKIVSFDLSKGSYPDHLEDGYHFQSK |
| | NLSLKILGNRRESEGWYLVSVEENVSVQQFCKQLKLYEQVSPPEIKVLNKT |
| | QENENGTCSLLLACTVKKGDHVTYSWSDEAGTHLLSRANRSHLLHITLSNQ |
| | HQDSIYNCTASNPVSSISRTFNLSSQACKQESSSESSPWMQYTLVPLGVVI |
| | IFILVFTAIIMMKRQGKSNHCQPPVEEKSLTIYAQVQKSGPQEKKLHDALT |
| | DQDPCTTIYVAATEPAPESVQEPNPTTVYASVTLPES (SEQ ID NO: 150) |
| Human CD40 | >NM_001250.6 Homo sapiens CD40 molecule (CD40), |
| | transcript variant 1, mRNA |
| | AGTGGTCCTGCCGCCTGGTCTCACCTCGCTATGGTTCGTCTGCCTCTGCAG |
| | TGCGTCCTCTGGGGCTGCTTGCTGACCGCTGTCCATCCAGAACCACCCACT |
| | GCATGCAGAGAAAAACAGTACCTAATAAACAGTCAGTGCTGTTCTTTGTGC |
| | CAGCCAGGACAGAAACTGGTGAGTGACTGCACAGAGTTCACTGAAACGGAA |
| | TGCCTTCCTTGCGGTGAAAGCGAATTCCTAGACACCTGGAACAGAGAGACA |
| | CACTGCCACCAGCACAAATACTGCGACCCCAACCTAGGGCTTCGGGTCCAG |
| | CAGAAGGGCACCTCAGAAACAGACACCATCTGCACCTGTGAAGAAGGCTGG |
| | CACTGTACGAGTGAGGCCTGTGAGAGCTGTGTCCTGCACCGCTCATGCTCG |
| | CCCGGCTTTGGGGTCAAGCAGATTGCTACAGGGGTTTCTGATACCATCTGC |
| | GAGCCCTGCCCAGTCGGCTTCTTCTCCAATGTGTCATCTGCTTTCGAAAAA |
| | TGTCACCCTTGGACAAGCTGTGAGACCAAAGACCTGGTTGTGCAACAGGCA |
| | GGCACAAACAAGACTGATGTTGTCTGTGGTCCCCAGGATCGGCTGAGAGCC |
| | CTGGTGGTGATCCCCATCATCTTCGGGATCCTGTTTGCCATCCTCTTGGTG |
| | CTGGTCTTTATCAAAAAGGTGGCCAAGAAGCCAACCAATAAGGCCCCCCAC |
| | CCCAAGCAGGAACCCCAGGAGATCAATTTTCCCGACGATCTTCCTGGCTCC |
| | AACACTGCTGCTCCAGTGCAGGAGACTTTACATGGATGCCAACCGGTCACC |
| | CAGGAGGATGGCAAAGAGAGTCGCATCTCAGTGCAGGAGAGACAGTGAGGC |
| | TGCACCCACCCAGGAGTGTGGCCACGTGGGCAAACAGGCAGTTGGCCAGAG |
| | AGCCTGGTGCTGCTGCTGCTGTGGCGTGAGGGTGAGGGGCTGGCACTGACT |
| | GGGCATAGCTCCCCGCTTCTGCCTGCACCCCTGCAGTTTGAGACAGGAGAC |
| | CTGGCACTGGATGCAGAAACAGTTCACCTTGAAGAACCTCTCACTTCACCC |
| | TGGAGCCCATCCAGTCTCCCAACTTGTATTAAAGACAGAGGCAGAAGTTTG |
| | GTGGTGGTGGTGTTGGGGTATGGTTTAGTAATATCCACCAGACCTTCCGAT |
| | CCAGCAGTTTGGTGCCCAGAGAGGCATCATGGTGGCTTCCCTGCGCCCAGG |
| | AAGCCATATACACAGATGCCCATTGCAGCATTGTTTGTGATAGTGAACAAC |
| | TGGAAGCTGCTTAACTGTCCATCAGCAGGAGACTGGCTAAATAAAATTAGA |
| | ATATATTTATACAACAGAATCTCAAAAACACTGTTGAGTAAGGAAAAAAAG |
| | GCATGCTGCTGAATGATGGGTATGGAACTTTTTAAAAAAGTACATGCTTTT |
| | ATGTATGTATATTGCCTATGGATATATGTATAAATACAATATGCATCATAT |
| | ATTGATATAACAAGGGTTCTGGAAGGGTACACAGAAAACCCACAGCTCGAA |
| | GAGTGGTGACGTCTGGGGTGGGGAAGAAGGGTCTGGGGGAGGGTTGGTTAA |
| | AGGGAGATTTGGCTTTCCCATAATGCTTCATCATTTTTCCCAAAAGGAGAG |
| | TGAATTCACATAATGCTTATGTAATTAAAAAATCATCAAACATGTAAAAA |
| | (SEQ ID NO: 151) |
| | >NP_001241.1 tumor necrosis factor receptor |
| | superfamily member 5 isoform 1 precursor [Homo |
| | sapiens] |
| | MVRLPLQCVLWGCLLTAVHPEPPTACREKQYLINSQCCSLCQPGQKLVSDC |
| | TEFTETECLPCGESEFLDTWNRETHCHQHKYCDPNLGLRVQQKGTSETDTI |
| | CTCEEGWHCTSEACESCVLHRSCSPGFGVKQIATGVSDTICEPCPVGFFSN |
| | VSSAFEKCHPWTSCETKDLVVQQAGTNKTDVVCGPQDRLRALVVIPIIFGI |
| | LFAILLVLVFIKKVAKKPTNKAPHPKQEPQEINFPDDLPGSNTAAPVQETL |
| | HGCQPVTQEDGKESRISVQERQ (SEQ ID NO: 152) |
| Mouse CD40 | >NM_170703.2 Mus musculus CD40 antigen (Cd40), |
| | transcript variant 2, mRNA |
| | AGCAGGGACTTTGGAGTGACTTGTGGCTTCAGCAGGAGCCCTGTGATTTGG |
| | CTCTTCTGATCTCGCCCTGCGATGGTGTCTTTGCCTCGGCTGTGCGCGCTA |
| | TGGGGCTGCTTGTTGACAGCGGTCCATCTAGGGCAGTGTGTTACGTGCAGT |
| | GACAAACAGTACCTCCACGATGGCCAGTGCTGTGATTTGTGCCAGCCAGGA |
| | AGCCGACTGACAAGCCACTGCACAGCTCTTGAGAAGACCCAATGCCACCCA |
| | TGTGACTCAGGCGAATTCTCAGCCCAGTGGAACAGGGAGATTCGCTGTCAC |
| | CAGCACAGACACTGTGAACCCAATCAAGGGCTTCGGGTTAAGAAGGAGGGC |
| | ACCGCAGAATCAGACACTGTCTGTACCTGTAAGGAAGGACAACACTGCACC |
| | AGCAAGGATTGCGAGGCATGTGCTCAGCACACGCCCTGTATCCCTGGCTTT |
| | GGAGTTATGGAGATGGCCACTGAGACCACTGATACCGTCTGTCATCCCTGC |
| | CCAGTCGGCTTCTTCTCCAATCAGTCATCACTTTTCGAAAAGTGTTATCCC |
| | TGGACAAGGTTTAAAGTCCCGGATGCGAGCCCTGCTGGTCATTCCTGTCGT |
| | GATGGGCATCCTCATCACCATTTTCGGGGTGTTTCTCTATATCAAAAAGGT |
| | GGTCAAGAAACCAAAGGATAATGAGATCTTACCCCCTGCGGCTCGACGGCA |
| | AGATCCCCAGGAGATGGAAGATTATCCCGGTCATAACACCGCTGCTCCAGT |
| | GCAGGAGACGCTGCACGGGTGTCAGCCTGTCACACAGGAGGATGGTAAAGA |
| | GAGTCGCATCTCAGTGCAGGAGCGGCAGGTGACAGACAGCATAGCCTTGAG |
| | GCCCCTGGTCTGAACCCTGGAACTGCTTTGGAGGCGATGGCTCGGCTCGGG |
| | AGCAGGGGCCTGGCTCTGAGGACTGCTTGCTGACCTTTGAAGTTTGAGATG |
| | AGCCAAGACAGAGCCCAGTGCAGCTAACTCTCATGCCTGCCCCCTATCATT |
| | TCTCAACTTGCTTTTTAAGGATGGAGGGAGAGCTCGGGCATCGGGGGTCCA |
| | CAGTGATACCTACCAAGTGCAGCAGTGCAGGACCCAGAGTCGTCTTGCTGC |
| | GGCGTTCACTGTAAGGAGTCATGGACACAGGAGTCCGTGGCCCACAGCTTG |
| | TGCTGCTAGAGGGCACCTGGTTGCCCATCAGCAGGGTACTGGCTAAATAAA |
| | TCTGTAATTATTTATACAATGACATCTCAGAAACTCTAGCAGGTGGGGCAG |
| | AAAACAGGTAGTAGAATGATGGGTAGAGAAATAGCTTTTAAAACACATTCC |
| | AAGGCAGGTAAGATGGCTTTTGTGAGTAAAGGAGCTTGCTGCCCAAACCCG |
| | GTTACCTGATTTTGATCCCTGGGACTTCATGGTAAAAGGGAGAGAACCAAA |
| | TCCAGAGGGTTGTCATTTGACCTCCATGTGTGCTCTGTGGTAATGTACCCC |
| | GTGTGTGCACATGTGCACATATCCTAAAATGGATGTGGTGGTGTATTGTAG |
| | AAATTATTTAATCCCGCCCTGGGGTTTCTACCTGTGTGTTACCATTTAGTT |
| | CTTGAATAAAAGACACACTCAACCTTTATATTTACAATAA (SEQ ID NO: |
| | 153) |
| | >NP_733804.1 tumor necrosis factor receptor |
| | superfamily member 5 isoform 2 precursor [Mus |
| | musculus] |
| | MVSLPRLCALWGCLLTAVHLGQCVTCSDKQYLHDGQCCDLCQPGSRLTSHC |
| | TALEKTQCHPCDSGEFSAQWNREIRCHQHRHCEPNQGLRVKKEGTAESDTV |
| | CTCKEGQHCTSKDCEACAQHTPCIPGFGVMEMATETTDTVCHPCPVGFFSN |
| | QSSLFEKCYPWTRFKVPDASPAGHSCRDGHPHHHFRGVSLYQKGGQETKG |
| | (SEQ ID NO: 154) |
| Human CD28 | >NM_006139.4 Homo sapiens CD28 molecule (CD28), |
| | transcript variant 1, mRNA |
| | ACACTTCGGGTTCCTCGGGGAGGAGGGGCTGGAACCCTAGCCCATCGTCAG |
| | GACAAAGATGCTCAGGCTGCTCTTGGCTCTCAACTTATTCCCTTCAATTCA |
| | AGTAACAGGAAACAAGATTTTGGTGAAGCAGTCGCCCATGCTTGTAGCGTA |
| | CGACAATGCGGTCAACCTTAGCTGCAAGTATTCCTACAATCTCTTCTCAAG |
| | GGAGTTCCGGGCATCCCTTCACAAAGGACTGGATAGTGCTGTGGAAGTCTG |
| | TGTTGTATATGGGAATTACTCCCAGCAGCTTCAGGTTTACTCAAAAACGGG |
| | GTTCAACTGTGATGGGAAATTGGGCAATGAATCAGTGACATTCTACCTCCA |
| | GAATTTGTATGTTAACCAAACAGATATTTACTTCTGCAAAATTGAAGTTAT |
| | GTATCCTCCTCCTTACCTAGACAATGAGAAGAGCAATGGAACCATTATCCA |
| | TGTGAAAGGGAAACACCTTTGTCCAAGTCCCCTATTTCCCGGACCTTCTAA |
| | GCCCTTTTGGGTGCTGGTGGTGGTTGGTGGAGTCCTGGCTTGCTATAGCTT |
| | GCTAGTAACAGTGGCCTTTATTATTTTCTGGGTGAGGAGTAAGAGGAGCAG |
| | GCTCCTGCACAGTGACTACATGAACATGACTCCCCGCCGCCCCGGGCCCAC |
| | CCGCAAGCATTACCAGCCCTATGCCCCACCACGCGACTTCGCAGCCTATCG |
| | CTCCTGACACGGACGCCTATCCAGAAGCCAGCCGGCTGGCAGCCCCCATCT |
| | GCTCAATATCACTGCTCTGGATAGGAAATGACCGCCATCTCCAGCCGGCCA |
| | CCTCAGGCCCCTGTTGGGCCACCAATGCCAATTTTTCTCGAGTGACTAGAC |
| | CAAATATCAAGATCATTTTGAGACTCTGAAATGAAGTAAAAGAGATTTCCT |
| | GTGACAGGCCAAGTCTTACAGTGCCATGGCCCACATTCCAACTTACCATGT |
| | ACTTAGTGACTTGACTGAGAAGTTAGGGTAGAAAACAAAAAGGGAGTGGAT |
| | TCTGGGAGCCTCTTCCCTTTCTCACTCACCTGCACATCTCAGTCAAGCAAA |
| | GTGTGGTATCCACAGACATTTTAGTTGCAGAAGAAAGGCTAGGAAATCATT |
| | CCTTTTGGTTAAATGGGTGTTTAATCTTTTGGTTAGTGGGTTAAACGGGGT |
| | AAGTTAGAGTAGGGGGAGGGATAGGAAGACATATTTAAAAACCATTAAAAC |
| | ACTGTCTCCCACTCATGAAATGAGCCACGTAGTTCCTATTTAATGCTGTTT |
| | TCCTTTAGTTTAGAAATACATAGACATTGTCTTTTATGAATTCTGATCATA |
| | TTTAGTCATTTTGACCAAATGAGGGATTTGGTCAAATGAGGGATTCCCTCA |
| | AAGCAATATCAGGTAAACCAAGTTGCTTTCCTCACTCCCTGTCATGAGACT |
| | TCAGTGTTAATGTTCACAATATACTTTCGAAAGAATAAAATAGTTCTCCTA |
| | CATGAAGAAAGAATATGTCAGGAAATAAGGTCACTTTATGTCAAAATTATT |
| | TGAGTACTATGGGACCTGGCGCAGTGGCTCATGCTTGTAATCCCAGCACTT |
| | TGGGAGGCCGAGGTGGGCAGATCACTTGAGATCAGGACCAGCCTGGTCAAG |
| | ATGGTGAAACTCCGTCTGTACTAAAAATACAAAATTTAGCTTGGCCTGGTG |
| | GCAGGCACCTGTAATCCCAGCTGCCCAAGAGGCTGAGGCATGAGAATCGCT |
| | TGAACCTGGCAGGCGGAGGTTGCAGTGAGCCGAGATAGTGCCACAGCTCTC |
| | CAGCCTGGGCGACAGAGTGAGACTCCATCTCAAACAACAACAACAACAACA |
| | ACAACAACAACAAACCACAAAATTATTTGAGTACTGTGAAGGATTATTTGT |
| | CTAACAGTTCATTCCAATCAGACCAGGTAGGAGCTTTCCTGTTTCATATGT |
| | TTCAGGGTTGCACAGTTGGTCTCTTTAATGTCGGTGTGGAGATCCAAAGTG |
| | GGTTGTGGAAAGAGCGTCCATAGGAGAAGTGAGAATACTGTGAAAAAGGGA |
| | TGTTAGCATTCATTAGAGTATGAGGATGAGTCCCAAGAAGGTTCTTTGGAA |
| | GGAGGACGAATAGAATGGAGTAATGAAATTCTTGCCATGTGCTGAGGAGAT |
| | AGCCAGCATTAGGTGACAATCTTCCAGAAGTGGTCAGGCAGAAGGTGCCCT |
| | GGTGAGAGCTCCTTTACAGGGACTTTATGTGGTTTAGGGCTCAGAGCTCCA |
| | AAACTCTGGGCTCAGCTGCTCCTGTACCTTGGAGGTCCATTCACATGGGAA |
| | AGTATTTTGGAATGTGTCTTTTGAAGAGAGCATCAGAGTTCTTAAGGGACT |
| | GGGTAAGGCCTGACCCTGAAATGACCATGGATATTTTTCTACCTACAGTTT |
| | GAGTCAACTAGAATATGCCTGGGGACCTTGAAGAATGGCCCTTCAGTGGCC |
| | CTCACCATTTGTTCATGCTTCAGTTAATTCAGGTGTTGAAGGAGCTTAGGT |
| | TTTAGAGGCACGTAGACTTGGTTCAAGTCTCGTTAGTAGTTGAATAGCCTC |
| | AGGCAAGTCACTGCCCACCTAAGATGATGGTTCTTCAACTATAAAATGGAG |
| | ATAATGGTTACAAATGTCTCTTCCTATAGTATAATCTCCATAAGGGCATGG |
| | CCCAAGTCTGTCTTTGACTCTGCCTATCCCTGACATTTAGTAGCATGCCCG |
| | ACATACAATGTTAGCTATTGGTATTATTGCCATATAGATAAATTATGTATA |
| | AAAATTAAACTGGGCAATAGCCTAAGAAGGGGGGAATATTGTAACACAAAT |
| | TTAAACCCACTACGCAGGGATGAGGTGCTATAATATGAGGACCTTTTAACT |
| | TCCATCATTTTCCTGTTTCTTGAAATAGTTTATCTTGTAATGAAATATAAG |
| | GCACCTCCCACTTTTATGTATAGAAAGAGGTCTTTTAATTTTTTTTTAATG |
| | TGAGAAGGAAGGGAGGAGTAGGAATCTTGAGATTCCAGATCGAAAATACTG |
| | TACTTTGGTTGATTTTTAAGTGGGCTTCCATTCCATGGATTTAATCAGTCC |
| | CAAGAAGATCAAACTCAGCAGTACTTGGGTGCTGAAGAACTGTTGGATTTA |
| | CCCTGGCACGTGTGCCACTTGCCAGCTTCTTGGGCACACAGAGTTCTTCAA |
| | TCCAAGTTATCAGATTGTATTTGAAAATGACAGAGCTGGAGAGTTTTTTGA |
| | AATGGCAGTGGCAAATAAATAAATACTTTTTTTTAAATGGAAAGACTTGAT |
| | CTATGGTAATAAATGATTTTGTTTTCTGACTGGAAAAATAGGCCTACTAAA |
| | GATGAATCACACTTGAGATGTTTCTTACTCACTCTGCACAGAAACAAAGAA |
| | GAAATGTTATACAGGGAAGTCCGTTTTCACTATTAGTATGAACCAAGAAAT |
| | GGTTCAAAAACAGTGGTAGGAGCAATGCTTTCATAGTTTCAGATATGGTAG |
| | TTATGAAGAAAACAATGTCATTTGCTGCTATTATTGTAAGAGTCTTATAAT |
| | TAATGGTACTCCTATAATTTTTGATTGTGAGCTCACCTATTTGGGTTAAGC |
| | ATGCCAATTTAAAGAGACCAAGTGTATGTACATTATGTTCTACATATTCAG |
| | TGATAAAATTACTAAACTACTATATGTCTGCTTTAAATTTGTACTTTAATA |
| | TTGTCTTTTGGTATTAAGAAAGATATGCTTTCAGAATAGATATGCTTCGCT |
| | TTGGCAAGGAATTTGGATAGAACTTGCTATTTAAAAGAGGTGTGGGGTAAA |
| | TCCTTGTATAAATCTCCAGTTTAGCCTTTTTTGAAAAAGCTAGACTTTCAA |
| | ATACTAATTTCACTTCAAGCAGGGTACGTTTCTGGTTTGTTTGCTTGACTT |
| | CAGTCACAATTTCTTATCAGACCAATGGCTGACCTCTTTGAGATGTCAGGC |
| | TAGGCTTACCTATGTGTTCTGTGTCATGTGAATGCTGAGAAGTTTGACAGA |
| | GATCCAACTTCAGCCTTGACCCCATCAGTCCCTCGGGTTAACTAACTGAGC |
| | CACCGGTCCTCATGGCTATTTTAATGAGGGTATTGATGGTTAAATGCATGT |
| | CTGATCCCTTATCCCAGCCATTTGCACTGCCAGCTGGGAACTATACCAGAC |
| | CTGGATACTGATCCCAAAGTGTTAAATTCAACTACATGCTGGAGATTAGAG |
| | ATGGTGCCAATAAAGGACCCAGAACCAGGATCTTGATTGCTATAGACTTAT |
| | TAATAATCCAGGTCAAAGAGAGTGACACACACTCTCTCAAGACCTGGGGTG |
| | AGGGAGTCTGTGTTATCTGCAAGGCCATTTGAGGCTCAGAAAGTCTCTCTT |
| | TCCTATAGATATATGCATACTTTCTGACATATAGGAATGTATCAGGAATAC |
| | TCAACCATCACAGGCATGTTCCTACCTCAGGGCCTTTACATGTCCTGTTTA |
| | CTCTGTCTAGAATGTCCTTCTGTAGATGACCTGGCTTGCCTCGTCACCCTT |
| | CAGGTCCTTGCTCAAGTGTCATCTTCTCCCCTAGTTAAACTACCCCACACC |
| | CTGTCTGCTTTCCTTGCTTATTTTTCTCCATAGCATTTTACCATCTCTTAC |
| | ATTAGACATTTTTCTTATTTATTTGTAGTTTATAAGCTTCATGAGGCAAGT |
| | AACTTTGCTTTGTTTCTTGCTGTATCTCCAGTGCCCAGAGCAGTGCCTGGT |
| | ATATAATAAATATTTATTGACTGAGTGAA (SEQ ID NO: 155) |
| | >NP_006130.1 T-cell-specific surface glycoprotein |
| | CD28 isoform 1 precursor [Homo sapiens] |
| | MLRLLLALNLFPSIQVTGNKILVKQSPMLVAYDNAVNLSCKYSYNLFSREF |
| | RASLHKGLDSAVEVCVVYGNYSQQLQVYSKTGFNCDGKLGNESVTFYLQNL |
| | YVNQTDIYFCKIEVMYPPPYLDNEKSNGTIIHVKGKHLCPSPLFPGPSKPF |
| | WVLVVVGGVLACYSLLVTVAFIIFWVRSKRSRLLHSDYMNMTPRRPGPTRK |
| | HYQPYAPPRDFAAYRS (SEQ ID NO: 156) |
| Mouse CD28 | >NM_007642.4 Mus musculus CD28 antigen (Cd28), mRNA |
| | AGACCTTGGCAGATGTGACTTCAGTTCACACCACACTCTGCCTTGCTCACA |
| | GAGGAGGGGCTGCAGCCCTGGCCCTCATCAGAACAATGACACTCAGGCTGC |
| | TGTTCTTGGCTCTCAACTTCTTCTCAGTTCAAGTAACAGAAAACAAGATTT |
| | TGGTAAAGCAGTCGCCCCTGCTTGTGGTAGATAGCAACGAGGTCAGCCTCA |
| | GCTGCAGGTATTCCTACAACCTTCTCGCAAAGGAATTCCGGGCATCCCTGT |
| | ACAAGGGCGTGAACAGCGACGTGGAAGTCTGTGTCGGGAATGGGAATTTTA |
| | CCTATCAGCCCCAGTTTCGCTCGAATGCCGAGTTCAACTGCGACGGGGATT |
| | TCGACAACGAAACAGTGACGTTCCGTCTCTGGAATCTGCACGTCAATCACA |
| | CAGATATTTACTTCTGCAAAATTGAGTTCATGTACCCTCCGCCTTACCTAG |
| | ACAACGAGAGGAGCAATGGAACTATTATTCACATAAAAGAGAAACATCTTT |
| | GTCATACTCAGTCATCTCCTAAGCTGTTTTGGGCACTGGTCGTGGTTGCTG |
| | GAGTCCTGTTTTGTTATGGCTTGCTAGTGACAGTGGCTCTTTGTGTTATCT |
| | GGACAAATAGTAGAAGGAACAGACTCCTTCAAAGTGACTACATGAACATGA |
| | CTCCCCGGAGGCCTGGGCTCACTCGAAAGCCTTACCAGCCCTACGCCCCTG |
| | CCAGAGACTTTGCAGCGTACCGCCCCTGACAGGGACCCCTATCCAGAAGCC |
| | CGCCGGCTGGTACCCGTCTACCTGCTCATCATCACTGCTCTGGATAGGAAA |
| | GGACAGCCTCATCTTCAGCCGGCCACTTTGGACCTCTACTGGGCCACCAAT |
| | GCCAACTATTTTAGAGTGTCTAGATCTAACATCATGATCATCTTGAGACTC |
| | TGGAATGAATGACAGAAGCTTCTATGGCAGGATAAAGTCTGTGTGGCTTGA |
| | CCCAAACTCAAGCTTAATACATTTATTGACTTGATTGGGGAAGTTAGAGTA |
| | GAGCAATCAAAAAGATCATTCATTCAGCCTTGGGAAGTCAATTTGCAGGCT |
| | CCTGGATGAGCCCTGCCCCGTTTTCACTTGCCAGCACATTTCAGTCATGTG |
| | GTGTGATAGCCAAAGATGTTTTGGACAGAGAAGAAAGGATAGAAAAACCTT |
| | CTCTTTGGCTAAGTTGGTGTTTGGGGTGGGGATAGGTTAGAGTATAGTACT |
| | TAACTATTTGAAAAATAATGAAAACACTTTTTTCACTCATGAAATGAGCCA |
| | CTTAGCTCCTAAATAGTGTTTTCCTGTTAGTTTAGAAAGTTGTGGACATAT |
| | TTTTTTAATGATTTCTGACCATTTTTAATCACATTGACTCATGGAATGGCC |
| | TCAAAGCACCCCCCAGTGCTTCTTTCCTCATTCCCGGTCATGGGAACTCAG |
| | TATTATTAATAGTCACAACATGATTTCAGAACTAGATAGCCCTCCCACACC |
| | AAGAAGAATGTGAGAGGAAGTAAGGTCACTTTATGTAAAAAAAAAAAAAAA |
| | CAAACGCGTACACATATGTATGTATACATACATACCTATGTGCACACACAC |
| | ACACATATACATACACACAAAATGCTATGAAGAGTTATCTGTTTAGTAGCC |
| | TGTTATAGTCAAATCATTTTAAGTTTCAACTTCTTACAGTTGGGCCACTTG |
| | TTGTCCTTTGTGGATGGATATCTGAAATTGTGTCTATATATTGCTAGTCAT |
| | GATACTGTGAACAAAAAGGGTAGTGTTAGTATTTGTCAGGGTGGTAAGGAT |
| | GCATTCCAGGAAGCTTCCTCTGAGGAAGGGAATGAGGTCATTCTTGCCATG |
| | TATGAAAGACATAGATGTTTTCCAGAAGGCACCATTGGGAGCCCCAGTATA |
| | AGTTCCTTTAGACTCTACAGTTTAGAGGGATTTTATATGTCCTAGGACTCA |
| | GGACTCCAGAACTTTGTGGGCTCAGCTGCTTCATACCATGGGGATACATTG |
| | ACATGAACAATTATTTTGGAATGTGTCTTTAGGGACGACATCAAAGTTCTC |
| | AAGTACCTACAAGACCTGATACTGGAATGAAGGTGGACTTTCTTTTTTGCT |
| | TCCAGTTCGGATCAACTGGAATGTATCTGGGGACCTTGAAGAACGGCTGTC |
| | CAGCTGTCTTCACCATTTGTATAGTGCTTTGAATTATTCAGAGGTTTTAAA |
| | GTCAGGAAGACCTGGTTTAAAAAACATTTCATTATGAGTTAAATGGCCTCA |
| | GGCAAGTCACTGTTCATCCAAGTCTATGACTCCTCAACTGTAAGATGGCCA |
| | CACTGAAACTTGCTAAGATCCTCTGGCCTCTGCCTCCCAAGAGTTGGGATT |
| | TCAGGAGTGCACAATCATGACCCAAACTCGTGATAATCTCTCAGCTTCAAT |
| | AACTTTCCAGCTAATTGGAATATCCTGTAATCAAACATGAGGCATTTCCCC |
| | TCCCCCCACTGTTTTTGTGTATAAAGAGATCTTTAAACTTTTTTTTTAATA |
| | TGAGGGGTAAGAAAAGATAGGAATCTTTTAATTCTAGACAGAAGATATTGT |
| | GCTTTGGTTTTTTTTTTTTTTAATGGCTTCTATTCTGTGCTTTTAATTAAA |
| | CCAGAGAAGGCCAAGATTAGCCCTACTTGTGTGATAAAAGAATGCTGGCCC |
| | TTGTGATTGCAGTCAGCCTCTTGACACATAGAGTTCTTGAATCTAAGTTAT |
| | AAAATTATATTTGAAAATGACAGAGCTGGAGAATTTATAGAAAGGGTCATA |
| | GCAAATAACAAACCATTTTTTTTTAAACGGAAAGATTTGGTCTTTGGCAAT |
| | CAATAACTTTGTTTTCTAACTGGAAAAGGAGGTTTACTGGAGATGAATCAC |
| | ACCTGAAAGTTTTCATACCTCCTCTGAACACAACCGAAACATAGGTGTCCA |
| | AAGCCTTTCGCTCTCGGTATGAACCAACAGGCGGGTTAAAAACACTGGGTC |
| | AGAGTAAAGCTTTTGCAGTTTCAGATGTAGTGTGTATGAAGAAAACTATGT |
| | CACTTGCTGCTATTATTGTAAGAGTCTAAGAACTAAAGGTGTGCCTGTAAT |
| | TTCTAATTATGAGCTCACCTATTTGGTACCGAGCATGCCAATTTTAAAGAG |
| | ACCCGGTGTACCTTATAGCTACATCCAATGATAAAATTACCACACTAGCAC |
| | ATGCCTGTGTTTAAACTCGTGCTTTAATGTTTTTCTTAGGGCAGGTATGCA |
| | CCCCCTTTGCAGTGAGTTGGGAGAGATTTTGAAAAAGTGTATGACAAACAT |
| | TTTTAACACCTTTGGTTTCCTCTCTCTGTGTCTCTTTGTCTCTGTCTCTCT |
| | CTTTCTCTCCTGTGCATATGTCTCCCCTCCCTCACTTCTCTGTCTCTTCCT |
| | CTCTCCCTCTCTCTGTCTTTCTCTGTGTGTCTCTCTGTCTCTGTGTATCTC |
| | TCTGTCTGTCTCTTTCTCTGCAGATTTTCAAAACGTTGTTTTTCTATGGAA |
| | GAAATACAAGCTGTGGTTGGTTTGCTACGAGTCAGTAGCAGTTTATCAGTA |
| | GGCCAATGTTTTATCTCTTGGAGATTTCAGTCTGGGTTTACCCAATGTATT |
| | CTCTGTAATGTGACTGCTGGGGACAGATATAACTTGATTGAGCCTTCAAAT |
| | CATTTAGGTCTTCAATCATTTAGTCAACGGAGTGAGCCACTAATCTGCAAT |
| | GGCTATTTTAATATGCATACTGATGGTCAAATGGATGTCTGATCTCTCATC |
| | CCAGCTTTCTGTACTACCATATGGGAACTATATGTAACTTGTATACTTACC |
| | TGAATATGTTAAATTCAACTACATGGTAAGATGGACCAGAAATTGCAATGT |
| | TCATGTCCATATAGCCACCATTAACCCAAGTTAAGCACAGTAGTGTGGGTT |
| | CTCTCAGGACTTGTGAATGAGTTTATGCTCTCTACAAAGACAGGTGAAGCT |
| | TAAATCTCTCTTGCACTGCTATGTTTATGCAAATATCAAGATTGTTTCTGT |
| | ACCAGGGACTTAACACATTCTATTCATACTATTTTCCCTGTCTACAATGTT |
| | ATTTCATAGATATCTACTTGGTTTGCTCTTACTTCCTTGACATATTTGCCC |
| | AAATGCCACCTTCAACTGTAGTTAATTACCTGTACAACCTGTCTCCATGCC |
| | TTGTTTTATTTTCTCTATAACTCTACTAATAGGTATTTTTCTTATTTATTG |
| | GTTTATTGCCTGTTTTTTTTCCTAAATCTACACCGGATCTCCAAAGGGAAA |
| | GAACTCCATTTGCTTTGATTTTATTGCTGTATCCCCAGTGCCTAGAATAAT |
| | GCTTAGCCTGCAATAAATATTTATTCATTGACT (SEQ ID NO: 157) |
| | >NP_031668.3 T-cell-specific surface glycoprotein |
| | CD28 precursor [Mus musculus] |
| | MTLRLLFLALNFFSVQVTENKILVKQSPLLVVDSNEVSLSCRYSYNLLAKE |
| | FRASLYKGVNSDVEVCVGNGNFTYQPQFRSNAEFNCDGDFDNETVTFRLWN |
| | LHVNHTDIYFCKIEFMYPPPYLDNERSNGTIIHIKEKHLCHTQSSPKLFWA |
| | LVVVAGVLFCYGLLVTVALCVIWTNSRRNRLLQSDYMNMTPRRPGLTRKPY |
| | QPYAPARDFAAYRP (SEQ ID NO: 158) |
| Human | >NM_144615.2 Homo sapiens transmembrane and |
| CD28H | immunoglobulin domain containing 2 (TMIGD2), |
| | transcript variant 1, mRNA |
| | GGAAGTCTGTCAACTGGGAGGGGGAGAGGGGGGTGATGGGCCAGGAATGGG |
| | GTCCCCGGGCATGGTGCTGGGCCTCCTGGTGCAGATCTGGGCCCTGCAAGA |
| | AGCCTCAAGCCTGAGCGTGCAGCAGGGGCCCAACTTGCTGCAGGTGAGGCA |
| | GGGCAGTCAGGCGACCCTGGTCTGCCAGGTGGACCAGGCCACAGCCTGGGA |
| | ACGGCTCCGTGTTAAGTGGACAAAGGATGGGGCCATCCTGTGTCAACCGTA |
| | CATCACCAACGGCAGCCTCAGCCTGGGGGTCTGCGGGCCCCAGGGACGGCT |
| | CTCCTGGCAGGCACCCAGCCATCTCACCCTGCAGCTGGACCCTGTGAGCCT |
| | CAACCACAGCGGGGCGTACGTGTGCTGGGCGGCCGTAGAGATTCCTGAGTT |
| | GGAGGAGGCTGAGGGCAACATAACAAGGCTCTTTGTGGACCCAGATGACCC |
| | CACACAGAACAGAAACCGGATCGCAAGCTTCCCAGGATTCCTCTTCGTGCT |
| | GCTGGGGGTGGGAAGCATGGGTGTGGCTGCGATCGTGTGGGGTGCCTGGTT |
| | CTGGGGCCGCCGCAGCTGCCAGCAAAGGGACTCAGGTAACAGCCCAGGAAA |
| | TGCATTCTACAGCAACGTCCTATACCGGCCCCGGGGGGCCCCAAAGAAGAG |
| | TGAGGACTGCTCTGGAGAGGGGAAGGACCAGAGGGGCCAGAGCATTTATTC |
| | AACCTCCTTCCCGCAACCGGCCCCCCGCCAGCCGCACCTGGCGTCAAGACC |
| | CTGCCCCAGCCCGAGACCCTGCCCCAGCCCCAGGCCCGGCCACCCCGTCTC |
| | TATGGTCAGGGTCTCTCCTAGACCAAGCCCCACCCAGCAGCCGAGGCCAAA |
| | AGGGTTCCCCAAAGTGGGAGAGGAGTGAGAGATCCCAGGAGACCTCAACAG |
| | GACCCCACCCATAGGTACACACAAAAAAGGGGGGATCGAGGCCAGACACGG |
| | TGGCTCACGCCTGTAATCCCAGCAGTTTGGGAAGCCGAGGCGGGTGGAACA |
| | CTTGAGGTCAGGGGTTTGAGACCAGCCTGGCTTGAACCTGGGAGGCGGAGG |
| | TTGCAGTGAGCCGAGATTGCGCCACTGCACTCCAGCCTGGGCGACAGAGTG |
| | AGACTCCGTCTCAAAAAAAACAAAAAGCAGGAGGATTGGGAGCCTGTCAGC |
| | CCCATCCTGAGACCCCGTCCTCATTTCTGTAATGATGGATCTCGCTCCCAC |
| | TTTCCCCCAAGAACCTAATAAAGGCTTGTGAAGAAAAAGCAAAAAAAAAAA |
| | AAAAAAA (SEQ ID NO: 159) |
| | >NP_653216.2 transmembrane and immunoglobulin |
| | domain-containing protein 2 isoform 1 precursor [Homo |
| | sapiens] |
| | MGSPGMVLGLLVQIWALQEASSLSVQQGPNLLQVRQGSQATLVCQVDQATA |
| | WERLRVKWTKDGAILCQPYITNGSLSLGVCGPQGRLSWQAPSHLTLQLDPV |
| | SLNHSGAYVCWAAVEIPELEEAEGNITRLFVDPDDPTQNRNRIASFPGFLF |
| | VLLGVGSMGVAAIVWGAWFWGRRSCQQRDSGNSPGNAFYSNVLYRPRGAPK |
| | KSEDCSGEGKDQRGQSIYSTSFPQPAPRQPHLASRPCPSPRPCPSPRPGHP |
| | VSMVRVSPRPSPTQQPRPKGFPKVGEE (SEQ ID NO: 160) |
| Human CD2 | >NM_001328609.2 Homo sapiens CD2 molecule (CD2), |
| | transcript variant 1, mRNA |
| | AGTCTCACTTCAGTTCCTTTTGCATGAAGAGCTCAGAATCAAAAGAGGAAA |
| | CCAACCCCTAAGATGAGCTTTCCATGTAAATTTGTAGCCAGCTTCCTTCTG |
| | ATTTTCAATGTTTCTTCCAAAGGTGCAGTCTCCAAAGAGATTACGAATGCC |
| | TTGGAAACCTGGGGTGCCTTGGGTCAGGACATCAACTTGGACATTCCTAGT |
| | TTTCAAATGAGTGATGATATTGACGATATAAAATGGGAAAAAACTTCAGAC |
| | AAGAAAAAGATTGCACAATTCAGAAAAGAGAAAGAGACTTTCAAGGAAAAA |
| | GATACATATAAGCTATTTAAAAATGGAACTCTGAAAATTAAGCATCTGAAG |
| | ACCGATGATCAGGATATCTACAAGGTATCAATATATGATACAAAAGGAAAA |
| | AATGTGTTGGAAAAAATATTTGATTTGAAGATTCAAGAGAGGGTCTCAAAA |
| | CCAAAGATCTCCTGGACTTGTATCAACACAACCCTGACCTGTGAGGTAATG |
| | AATGGAACTGACCCCGAATTAAACCTGTATCAAGATGGGAAACATCTAAAA |
| | CTTTCTCAGAGGGTCATCACACACAAGTGGACCACCAGCCTGAGTGCAAAA |
| | TTCAAGTGCACAGCAGGGAACAAAGTCAGCAAGGAATCCAGTGTCGAGCCT |
| | GTCAGCTGTCCAGGAGGCAGCATCCTTGGCCAGAGTAATGGGCTCTCTGCC |
| | TGGACCCCTCCCAGCCATCCCACTTCTCTTCCTTTTGCAGAGAAAGGTCTG |
| | GACATCTATCTCATCATTGGCATATGTGGAGGAGGCAGCCTCTTGATGGTC |
| | TTTGTGGCACTGCTCGTTTTCTATATCACCAAAAGGAAAAAACAGAGGAGT |
| | CGGAGAAATGATGAGGAGCTGGAGACAAGAGCCCACAGAGTAGCTACTGAA |
| | GAAAGGGGCCGGAAGCCCCACCAAATTCCAGCTTCAACCCCTCAGAATCCA |
| | GCAACTTCCCAACATCCTCCTCCACCACCTGGTCATCGTTCCCAGGCACCT |
| | AGTCATCGTCCCCCGCCTCCTGGACACCGTGTTCAGCACCAGCCTCAGAAG |
| | AGGCCTCCTGCTCCGTCGGGCACACAAGTTCACCAGCAGAAAGGCCCGCCC |
| | CTCCCCAGACCTCGAGTTCAGCCAAAACCTCCCCATGGGGCAGCAGAAAAC |
| | TCATTGTCCCCTTCCTCTAATTAAAAAAGATAGAAACTGTCTTTTTCAATA |
| | AAAAGCACTGTGGATTTCTGCCCTCCTGATGTGCATATCCGTACTTCCATG |
| | AGGTGTTTTCTGTGTGCAGAACATTGTCACCTCCTGAGGCTGTGGGCCACA |
| | GCCACCTCTGCATCTTCGAACTCAGCCATGTGGTCAACATCTGGAGTTTTT |
| | GGTCTCCTCAGAGAGCTCCATCACACCAGTAAGGAGAAGCAATATAAGTGT |
| | GATTGCAAGAATGGTAGAGGACCGAGCACAGAAATCTTAGAGATTTCTTGT |
| | CCCCTCTCAGGTCATGTGTAGATGCGATAAATCAAGTGATTGGTGTGCCTG |
| | GGTCTCACTACAAGCAGCCTATCTGCTTAAGAGACTCTGGAGTTTCTTATG |
| | TGCCCTGGTGGACACTTGCCCACCATCCTGTGAGTAAAAGTGAAATAAAAG |
| | CTTTGACTAGA (SEQ ID NO: 161) |
| | >NP_001315538.1 T-cell surface antigen CD2 isoform 1 |
| | precursor [Homo sapiens] |
| | MSFPCKFVASFLLIFNVSSKGAVSKEITNALETWGALGQDINLDIPSFQMS |
| | DDIDDIKWEKTSDKKKIAQFRKEKETFKEKDTYKLFKNGTLKIKHLKTDDQ |
| | DIYKVSIYDTKGKNVLEKIFDLKIQERVSKPKISWTCINTTLTCEVMNGTD |
| | PELNLYQDGKHLKLSQRVITHKWTTSLSAKFKCTAGNKVSKESSVEPVSCP |
| | GGSILGQSNGLSAWTPPSHPTSLPFAEKGLDIYLIIGTCGGGSLLMVFVAL |
| | LVFYITKRKKQRSRRNDEELETRAHRVATEERGRKPHQIPASTPQNPATSQ |
| | HPPPPPGHRSQAPSHRPPPPGHRVQHQPQKRPPAPSGTQVHQQKGPPLPRP |
| | RVQPKPPHGAAENSLSPSSN (SEQ ID NO: 162) |
| Mouse CD2 | >NM_013486.2 Mus musculus CD2 antigen (Cd2), mRNA |
| | GCCTCACCACAGTCCTGACAGAAAGAACTCAGAGTCACCCCTGGGAAAAGA |
| | ACTCTAAAGATGAAATGTAAATTCCTGGGTAGCTTCTTTCTGCTCTTCAGC |
| | CTTTCCGGCAAAGGGGCGGACTGCAGAGACAATGAGACCATCTGGGGTGTC |
| | TTGGGTCATGGCATCACCCTGAACATCCCCAACTTTCAAATGACTGATGAT |
| | ATTGATGAGGTGCGATGGGTAAGGAGGGGCACCCTGGTCGCAGAGTTTAAA |
| | AGGAAGAAGCCACCTTTTTTGATATCAGAAACGTATGAGGTCTTAGCAAAC |
| | GGATCCCTGAAGATAAAGAAGCCGATGATGAGAAACGACAGTGGCACCTAT |
| | AATGTAATGGTGTATGGCACAAATGGGATGACTAGGCTGGAGAAGGACCTG |
| | GACGTGAGGATTCTGGAGAGGGTCTCAAAGCCCATGATCCACTGGGAATGC |
| | CCCAACACAACCCTGACCTGTGCGGTCTTGCAAGGGACAGATTTTGAACTG |
| | AAGCTGTATCAAGGGGAAACACTACTCAATAGTCTCCCCCAGAAGAACATG |
| | AGTTACCAGTGGACCAACCTGAACGCACCATTCAAGTGTGAGGCGATAAAC |
| | CCGGTCAGCAAGGAGTCTAAGATGGAAGTTGTTAACTGTCCAGAGAAAGGT |
| | CTGTCCTTCTATGTCACAGTGGGGGTCGGTGCAGGAGGACTCCTCTTGGTG |
| | CTCTTGGTGGCGCTTTTTATTTTCTGTATCTGCAAGAGGAGAAAACGGAAC |
| | AGGAGGAGAAAAGATGAAGAGCTGGAAATAAAAGCTTCCAGAACAAGCACT |
| | GTGGAAAGGGGCCCCAAGCCGCACTCAACCCCAGCCGCAGCAGCGCAGAAT |
| | TCAGTGGCGCTCCAAGCTCCTCCTCCACCTGGCCATCACCTCCAGACACCT |
| | GGCCATCGTCCCTTGCCTCCAGGCCACCGTACCCGTGAGCACCAGCAGAAG |
| | AAGAGACCTCCTCCATCAGGCACACAGATTCACCAGCAGAAAGGCCCTCCT |
| | TTACCCAGACCCCGAGTTCAGCCAAAACCTCCCTGTGGGAGTGGAGATGGT |
| | GTTTCACTGCCGCCCCCTAATTAAGAAGGCAGAGTTCGTCATTTCCAATAA |
| | AAAGCTGTGTGGATTTATCTTC (SEQ ID NO: 163) |
| | >NP_038514.1 T-cell surface antigen CD2 precursor |
| | [Mus musculus] |
| | MKCKFLGSFFLLFSLSGKGADCRDNETIWGVLGHGITLNIPNFQMTDDIDE |
| | VRWVRRGTLVAEFKRKKPPFLISETYEVLANGSLKIKKPMMRNDSGTYNVM |
| | VYGTNGMTRLEKDLDVRILERVSKPMIHWECPNTTLTCAVLQGTDFELKLY |
| | QGETLLNSLPQKNMSYQWTNLNAPFKCEAINPVSKESKMEVVNCPEKGLSF |
| | YVTVGVGAGGLLLVLLVALFIFCICKRRKRNRRRKDEELEIKASRTSTVER |
| | GPKPHSTPAAAAQNSVALQAPPPPGHHLQTPGHRPLPPGHRTREHQQKKRP |
| | PPSGTQIHQQKGPPLPRPRVQPKPPCGSGDGVSLPPPN (SEQ ID NO: |
| | 164) |
| Human LFA-3 | >NM_001779.3 Homo sapiens CD58 molecule (CD58), |
| (CD58) | transcript variant 1, mRNA |
| | GAACTTAGGGCTGCTTGTGGCTGGGCACTCGCGCAGAGGCCGGCCCGACGA |
| | GCCATGGTTGCTGGGAGCGACGCGGGGCGGGCCCTGGGGGTCCTCAGCGTG |
| | GTCTGCCTGCTGCACTGCTTTGGTTTCATCAGCTGTTTTTCCCAACAAATA |
| | TATGGTGTTGTGTATGGGAATGTAACTTTCCATGTACCAAGCAATGTGCCT |
| | TTAAAAGAGGTCCTATGGAAAAAACAAAAGGATAAAGTTGCAGAACTGGAA |
| | AATTCTGAATTCAGAGCTTTCTCATCTTTTAAAAATAGGGTTTATTTAGAC |
| | ACTGTGTCAGGTAGCCTCACTATCTACAACTTAACATCATCAGATGAAGAT |
| | GAGTATGAAATGGAATCGCCAAATATTACTGATACCATGAAGTTCTTTCTT |
| | TATGTGCTTGAGTCTCTTCCATCTCCCACACTAACTTGTGCATTGACTAAT |
| | GGAAGCATTGAAGTCCAATGCATGATACCAGAGCATTACAACAGCCATCGA |
| | GGACTTATAATGTACTCATGGGATTGTCCTATGGAGCAATGTAAACGTAAC |
| | TCAACCAGTATATATTTTAAGATGGAAAATGATCTTCCACAAAAAATACAG |
| | TGTACTCTTAGCAATCCATTATTTAATACAACATCATCAATCATTTTGACA |
| | ACCTGTATCCCAAGCAGCGGTCATTCAAGACACAGATATGCACTTATACCC |
| | ATACCATTAGCAGTAATTACAACATGTATTGTGCTGTATATGAATGGTATT |
| | CTGAAATGTGACAGAAAACCAGACAGAACCAACTCCAATTGATTGGTAACA |
| | GAAGATGAAGACAACAGCATAACTAAATTATTTTAAAAACTAAAAAGCCAT |
| | CTGATTTCTCATTTGAGTATTACAATTTTTGAACAACTGTTGGAAATGTAA |
| | CTTGAAGCAGCTGCTTTAAGAAGAAATACCCACTAACAAAGAACAAGCATT |
| | AGTTTTGGCTGTCATCAACTTATTATATGACTAGGTGCTTGCTTTTTTTGT |
| | CAGTAAATTGTTTTTACTGATGATGTAGATACTTTTGTAAATAAATGTAAA |
| | TATGTACACAAGTGA (SEQ ID NO: 165) |
| | >NP_001770.1 lymphocyte function-associated antigen |
| | 3 isoform 1 [Homo sapiens] |
| | MVAGSDAGRALGVLSVVCLLHCFGFISCFSQQIYGVVYGNVTFHVPSNVPL |
| | KEVLWKKQKDKVAELENSEFRAFSSFKNRVYLDTVSGSLTIYNLTSSDEDE |
| | YEMESPNITDTMKFFLYVLESLPSPTLTCALTNGSIEVQCMIPEHYNSHRG |
| | LIMYSWDCPMEQCKRNSTSIYFKMENDLPQKIQCTLSNPLFNTTSSIILTT |
| | CIPSSGHSRHRYALIPIPLAVITTCIVLYMNGILKCDRKPDRTNSN (SEQ |
| | ID NO: 166) |
| Human CD48 | >NM_001778.4 Homo sapiens CD48 molecule (CD48), |
| | transcript variant 1, mRNA |
| | CTTTTTCTAGCCAGGCTCTCAACTGTCTCCTGCGTTGCTGGGAAGTTCTGG |
| | AAGGAAGCATGTGCTCCAGAGGTTGGGATTCGTGTCTGGCTCTGGAATTGC |
| | TACTGCTGCCTCTGTCACTCCTGGTGACCAGCATTCAAGGTCACTTGGTAC |
| | ATATGACCGTGGTCTCCGGCAGCAACGTGACTCTGAACATCTCTGAGAGCC |
| | TGCCTGAGAACTACAAACAACTAACCTGGTTTTATACTTTCGACCAGAAGA |
| | TTGTAGAATGGGATTCCAGAAAATCTAAGTACTTTGAATCCAAATTTAAAG |
| | GCAGGGTCAGACTTGATCCTCAGAGTGGCGCACTGTACATCTCTAAGGTCC |
| | AGAAAGAGGACAACAGCACCTACATCATGAGGGTGTTGAAAAAGACTGGGA |
| | ATGAGCAAGAATGGAAGATCAAGCTGCAAGTGCTTGACCCTGTACCCAAGC |
| | CTGTCATCAAAATTGAGAAGATAGAAGACATGGATGACAACTGTTATCTGA |
| | AACTGTCATGTGTGATACCTGGCGAGTCTGTAAACTACACCTGGTATGGGG |
| | ACAAAAGGCCCTTCCCAAAGGAGCTCCAGAACAGTGTGCTTGAAACCACCC |
| | TTATGCCACATAATTACTCCAGGTGTTATACTTGCCAAGTCAGCAATTCTG |
| | TGAGCAGCAAGAATGGCACGGTCTGCCTCAGTCCACCCTGTACCCTGGCCC |
| | GGTCCTTTGGAGTAGAATGGATTGCAAGTTGGCTAGTGGTCACGGTGCCCA |
| | CCATTCTTGGCCTGTTACTTACCTGAGATGAGCTCTTTTAACTCAAGCGAA |
| | ACTTCAAGGCCAGAAGATCTTGCCTGTTGGTGATCATGCTCCTCACCAGGA |
| | CAGAGACTGTATAGGCTGACCAGAAGCATGCTGCTGAATTATCAACGAGGA |
| | TTTTCAAGTTAACTTTTAAATACTGGTTATTATTTAATTTTATATCCCTTT |
| | GTTGTTTTCTAGTACACAGAGATATAGAGATACACATGCTTTTTTCCCACC |
| | CAAAATTGTGACAACATTATGTGAATGTTTTATTATTTTTTAAAATAAACA |
| | TTTGATATAATTGTCAATTAACTGAA (SEQ ID NO: 167) |
| | >NP_001769.2 CD48 antigen isoform 1 precursor [Homo |
| | sapiens] |
| | MCSRGWDSCLALELLLLPLSLLVTSIQGHLVHMTVVSGSNVTLNISESLPE |
| | NYKQLTWFYTFDQKIVEWDSRKSKYFESKFKGRVRLDPQSGALYISKVQKE |
| | DNSTYIMRVLKKTGNEQEWKIKLQVLDPVPKPVIKIEKIEDMDDNCYLKLS |
| | CVIPGESVNYTWYGDKRPFPKELQNSVLETTLMPHNYSRCYTCQVSNSVSS |
| | KNGTVCLSPPCTLARSFGVEWIASWLVVTVPTILGLLLT (SEQ ID NO: |
| | 168) |
| Mouse CD48 | >NM_007649.5 Mus musculus CD48 antigen (Cd48), |
| | transcript variant 1, mRNA |
| | ATACGACTTCCGGTTTTGGGTTTTGCTTCCTGATTGAAGGGCAGGCGCCCT |
| | GACTTCTCTTACAGTTGTCTCCAGTGTTCTGGGGAAGCTTCTCTAAGTATT |
| | ATGTGCTTCATAAAACAGGGATGGTGTCTGGTCCTGGAACTGCTACTGCTG |
| | CCCTTGGGAACTGGATTTCAAGGTCATTCAATACCAGATATAAATGCCACC |
| | ACCGGCAGCAATGTAACCCTGAAAATCCATAAGGACCCACTTGGACCATAT |
| | AAACGTATCACCTGGCTTCATACTAAAAATCAGAAGATTTTAGAGTACAAC |
| | TATAATAGTACAAAGACAATCTTCGAGTCTGAATTTAAAGGCAGGGTTTAT |
| | CTTGAAGAAAACAATGGTGCACTTCATATCTCTAATGTCCGGAAAGAGGAC |
| | AAAGGTACCTACTACATGAGAGTGCTGCGTGAAACTGAGAACGAGTTGAAG |
| | ATAACCCTGGAAGTATTTGATCCTGTGCCCAAGCCTTCCATAGAAATCAAT |
| | AAGACTGAAGCGTCGACTGATTCCTGTCACCTGAGGCTATCGTGTGAGGTA |
| | AAGGACCAGCATGTTGACTATACTTGGTATGAGAGCTCGGGACCTTTCCCC |
| | AAAAAGAGTCCAGGATATGTGCTCGATCTCATCGTCACACCACAGAACAAG |
| | TCTACATTTTACACCTGCCAAGTCAGCAATCCTGTAAGCAGCAAGAACGAC |
| | ACAGTGTACTTCACTCTACCTTGTGATCTAGCCAGATCTTCTGGAGTATGT |
| | TGGACTGCAACTTGGCTAGTGGTCACAACACTCATCATTCACAGGATCCTG |
| | TTAACCTGACAAGAACTCTTCTCACCCAAGAAGGCAACTTGGAAGCACAGA |
| | GTCTTGCCTTCATCCCTAGCAGTGTTCCTAGCCAGCGAAGCAACTCTGGCT |
| | CTATTGGACAAAGGAAAATGTGTTACTGAACGTCTGCGAGAGTTTGCATGC |
| | ATGCTCTATGAAACAAGCACAGGACCTTGTACAGTGCTCCACCACTGACCT |
| | GTGTGCCCAGTCCTTTACAAAGATTTCAAATCAACCTTTTAAAAACTGTGC |
| | ATAATATCTAATTTTATATACCCTAGTTGTTTCCCAACATATATTAAAGAT |
| | AAATGCATTCTTTTTACCAAAATGTGACTATATTATTTTCATGTTTTCATA |
| | TCTCTTTTTAAAATAAATTCTTTTAAAAAACT (SEQ ID NO: 169) |
| | >NP_031675.1 CD48 antigen isoform 1 precursor [Mus |
| | musculus] |
| | MCFIKQGWCLVLELLLLPLGTGFQGHSIPDINATTGSNVTLKIHKDPLGPY |
| | KRITWLHTKNQKILEYNYNSTKTIFESEFKGRVYLEENNGALHISNVRKED |
| | KGTYYMRVLRETENELKITLEVFDPVPKPSIEINKTEASTDSCHLRLSCEV |
| | KDQHVDYTWYESSGPFPKKSPGYVLDLIVTPQNKSTFYTCQVSNPVSSKND |
| | TVYFTLPCDLARSSGVCWTATWLVVTTLIIHRILLT (SEQ ID NO: 170) |
| Human CD226 | >NM_006566.4 Homo sapiens CD226 molecule (CD226), |
| | transcript variant 1, mRNA |
| | GCAGATGGGAAGAAGCGTTAGAGCGAGCAGCACTCACATCTCAAGAACCAG |
| | CCTTTCAAACAGTTTCCAGAGATGGATTATCCTACTTTACTTTTGGCTCTT |
| | CTTCATGTATACAGAGCTCTATGTGAAGAGGTGCTTTGGCATACATCAGTT |
| | CCCTTTGCCGAGAACATGTCTCTAGAATGTGTGTATCCATCAATGGGCATC |
| | TTAACACAGGTGGAGTGGTTCAAGATCGGGACCCAGCAGGATTCCATAGCC |
| | ATTTTCAGCCCTACTCATGGCATGGTCATAAGGAAGCCCTATGCTGAGAGG |
| | GTTTACTTTTTGAATTCAACGATGGCTTCCAATAACATGACTCTTTTCTTT |
| | CGGAATGCCTCTGAAGATGATGTTGGCTACTATTCCTGCTCTCTTTACACT |
| | TACCCACAGGGAACTTGGCAGAAGGTGATACAGGTGGTTCAGTCAGATAGT |
| | TTTGAGGCAGCTGTGCCATCAAATAGCCACATTGTTTCGGAACCTGGAAAG |
| | AATGTCACACTCACTTGTCAGCCTCAGATGACGTGGCCTGTGCAGGCAGTG |
| | AGGTGGGAAAAGATCCAGCCCCGTCAGATCGACCTCTTAACTTACTGCAAC |
| | TTGGTCCATGGCAGAAATTTCACCTCCAAGTTCCCAAGACAAATAGTGAGC |
| | AACTGCAGCCACGGAAGGTGGAGCGTCATCGTCATCCCCGATGTCACAGTC |
| | TCAGACTCGGGGCTTTACCGCTGCTACTTGCAGGCCAGCGCAGGAGAAAAC |
| | GAAACCTTCGTGATGAGATTGACTGTAGCCGAGGGTAAAACCGATAACCAA |
| | TATACCCTCTTTGTGGCTGGAGGGACAGTTTTATTGTTGTTGTTTGTTATC |
| | TCAATTACCACCATCATTGTCATTTTCCTTAACAGAAGGAGAAGGAGAGAG |
| | AGAAGAGATCTATTTACAGAGTCCTGGGATACACAGAAGGCACCCAATAAC |
| | TATAGAAGTCCCATCTCTACCAGTCAACCTACCAATCAATCCATGGATGAT |
| | ACAAGAGAGGATATTTATGTCAACTATCCAACCTTCTCTCGCAGACCAAAG |
| | ACTAGAGTTTAAGCTTATTCTTGACATGAGTGCATTAGTAATGACTCTTAT |
| | GTACTCATGCATGGATCTTTATGCAATTTTTTTCCACTACCCAAGGTCTAC |
| | CTTAGATACTAGTTGTCTGAATTGAGTTACTTTGATAGGAAAAATACTTCA |
| | TTACCTAAAATCATTTTTCATAGAACTGTTTCAGAAAACCTGACTCTAACT |
| | GGTTTATATACAAAAGAAAACTTACTGTATCATATAACAGAATGATCCAGG |
| | GGAGATTAAGCTTTGGGCAAGGGCTATTTACCAGGGCTTAAATGTTGTGTC |
| | TAGAATTAAGTATGGGCATAAACTGGCTTCTGAATCCCTTTCCAGAGTGTT |
| | GGATCCATTTCCCTGGTCTTGGCCTCACTCTCATGCAGGCTTTCCTCTTGT |
| | GTTGGCAAGATGGCTGCCAACTCTTGGCAATTCATACATCCTTGTTTCTGT |
| | CTGGTAGAGAGTTTGCTTCTCAAATGGAGCAAACAAATTTGATTATTTTTT |
| | CATTGTTAAATAGGCAACATGACCAGAAAGGATGGAATGGCTTAAGTAAAC |
| | TAAGGGTTCACTTCTAGAGCTGAGAAGCAGGGTCAAAGCACAATACTGGGC |
| | AATTCAGAGCATGGTTAGAAGAGGAAAGGGGAGTCTCAAAGCTGGAGAGTT |
| | TACCAACAAATATTGACTGCAGTGATTAACCAAGACATTTTTGTTAACTAA |
| | AAAGTGAAATATGGGATGGATTCTAGAAATGGGGTATCTCTGTCCATACTT |
| | CTAGAATCCACTCTATCAGCATAGTCCAGAAGAATACCTGGCAGTAGAAGA |
| | AATGAATATTCAAGAGGAAGATAAATGCGAGAGGGCAATCCTTTACTATTC |
| | TCATATTTATTTATCTCTCATTCTGTATAGAATTCTTGCCGCCATCCCAGG |
| | TCTAGCCTTAGGAGCAAATGTAGTAGATAGTCGAATAATAAATAACTTAAT |
| | GTTTTGGACATATTTTGTCTACTTTTGAGAATTATTTTTAATATGTAAATT |
| | CTCTCAAAAGGGTCAGGCACCTAGTTATTATTTTTTAATGATTATGTGAAA |
| | GTTGAATATAATATACCACTAAAAGTGACAGTTGAAAGTGGTGGCATAGGA |
| | CGGTAGGGTAGAAATTTGGGAGGGAAAAAAGAAATTGGGAGGGTACAGGCA |
| | ACAGGAGAAAGGAATCAAACCACAGAAAAATACAAAGGGAAACTTCTGCTT |
| | CACTATTCAGACAAAGACAGCCCTAATGACATCACCAACAGTCAAAGCAAT |
| | TAGAGACCATACCTAATATTGTTTAAATTCTAGATGTAGGCTAACAATGAA |
| | AAGTATTTGCCAAACTGAATAAAACTGTCATGGTTACCTTGAAAGGACAAT |
| | GGTTATTGTTAAATATAGTGATCATTCATGTCTAAAAGATTCATTATTTAT |
| | CTCTAAAGATTTCTAAAGACCACCATCTAGAAAAGATTCATTATGAAGGCT |
| | GTATTTAAATATCAAAGTTGTGGACTTCATGATAATCTTAAATAAAGCAAA |
| | TCCAAATTCTCCTGTTGCCTAGACAGATTCTAAGATGTAATTTACACTTTT |
| | AAGCTAATTAGTGAGTATTTTATGATTTTAGCCTTAAACACCATGTATGCC |
| | AAATAATGCACTTGTTTTGTGAATTACAGAAATGGTAAGTGCCCACATTTC |
| | TGTGAATTATAAAATTTGTGAGTTTCTTTTAACCCTTTTCAGGAGTGAAAA |
| | AATAAAAACGACCATTTCCTGGTTGTGCTTAAGTATATGCAAGAAGGGTAA |
| | ACTCTCATTTTTATTATGTTTGCTTAAAGATCTTTTTATACCTGGATTCAT |
| | GAAATGTTTCCACAAATATATTAGTGTAACAAACTTGAAAGGCAGTTTACA |
| | AGAAAGCACTCTACTATCAGATCAATCAAAGATTCTGTGAGTGAATTTATT |
| | GGTTTGCATGGTGAAGCAAGCTTAGCATCAATTAAAAGGTAAATAATTTCT |
| | TTTCTGAATGGTAAAGACAATCAAAATATTACTTTCTGGAAAACTCCAATA |
| | ACCAAATTCTCAATGATTAGTGTATGTGAGCAGGAAAACATTTTTACAGTT |
| | GTAGTATGGGGAAATATAAATCCAATTTTAAGAGAGAAAATTATGACTGGG |
| | TGTGGAAGGGACAGTATAGTCAGATACCATTGTCATGGTGGTTTTTACTGG |
| | GAACTTCATGAAAGACTTTTGTAGCAAACCACTGCAGTATTGCAAAGCCTC |
| | CAGAACATTTGGAACTTGTCTCTTTTTCCTTGTGTGTGTTTGTGTTTTTGG |
| | TCTCTCATTCAAAATATTGATGAGAACTATTTACTCTGTCCTTTCTTCTCT |
| | ATATATTCTTCCTCTACAGAGTGTAGGGTTTTTTCAGGAATTTGGAGCCAT |
| | CTGAAGTCCTCCCAAAAATTCTCTGACGTCTTCTGATGCTCCTGTTATACC |
| | CTCAGGGGTAATGCTTGTGAAATTCCATTCATTCATTTTCTTTCTCTGGAC |
| | ATCTTTACTTACCAAAGCACTTTCATTGTCATCTTTTTAACATCATTCTTA |
| | ATTCGTGATAGTTTTGGGACTCTCCCTAGTGTATGTTTCTCCCCCTCTACT |
| | CTTTTGCACCTATGATTCTGATTGTTACTAAGAAAGCAGATGAAAAACAGA |
| | TCCACAGAATAAACGATCAGAATTCCAGTAAATTCTATTTTAAATACAGAT |
| | ACTTTTTACAAGTTGCTGCTTTGGAAGCAAAATGCTTCTTAAGTTTTACAT |
| | ATATATATATATATATACATATATATATACACATATAATTTATATCGATGG |
| | ATAATACATTAAGAATCTATGCTTCCTTTGAATGCCATTAATATTTATGTT |
| | AAAGTAACCAATGAAAGGAAATTACTTTGTTATAATAAGATAGGAAGACTT |
| | GTTAATGGAGTACACAGTTTTGTCAGGGAAAGAACACATCTTATTGAACTA |
| | TGATGACTATGCATTGACTATATTATTATAAGAGATACCTTCAAACTTTAT |
| | TTAAAGAACTTTAGGTATAATATGTTGAGAAAATAAAATAGAAATTTCATT |
| | TACTTGTAATCATGCTTAAAATGGGAGGCAGGTAGGTGAAGATATAATTTT |
| | TAGTAAAAACTCCAATTTATGTTTTAAGTAATTCAGTGTATTACTAAAATA |
| | CTATATATATAAACTTAAAATACATGGGTTATCAATTTAAAAGACAAAGTA |
| | AGTAAAAATACTTTTAGTAGGCATTCGTGGATTGTGAACATCCAAGTTATA |
| | TTGGTTTGTATAGAATGGCATTAAGTAAAAATTACAGCTGTATAACAGTAG |
| | TTTTCTAAATTGAGAGAGTCCACATTGTAATTAGAGATCACTGTGACCAAA |
| | ATGCTTCTCCTTGATTTATAATGATGTACTGTATTTTGTACTGCTTATATG |
| | AAATTTCAGCAAGATTGACGATATTATAAAGATGCTTATAAAGTGTAAGTG |
| | GAGACGCTAAATTGTGAGTACAAAGTTTCTTTTTCACAACAGTGATAAGAA |
| | AATATCTTTAAAAAATATAAGACAATATAAACATGTCATCATTAGTTTAGC |
| | TACTATTAAAATGTAACATCTAGAAAGTACTGATCTCCACCTTCAGACTTC |
| | TGTATAAGTATATTTTTTCACTGATCTGTTCATTAGAGTTCTTCCAGCCAA |
| | GACTCTGGGCTCTTAAAACATGTATCTGAAAACTAAAAACAAGTTAATTTT |
| | TTTAAAAGCTTCTCTATTTCTAGTGATTCAATAGGTAGAAAAATAGCTTCT |
| | AGAATTAACTGCAATGCTTTCTAAGGAAATTTTATAAATCCTCAAGGTCGG |
| | TTTACACATATTTTTCCAGATTCAGAGCACTAACTATCTTGTAAGATGTAA |
| | GAAAAGGTCCATTTGGAAGTATGAGTAATAAATGTCTGGGATAATTCTGGT |
| | TTATTTCGTATTATCCTTGTTAGAATAAGTTATATGGTCAACCTGTTCAGA |
| | ACACTTTTTCTAGTGTTAGTGTGTACTTTTGGATTTTTGGTTCTTGTAGGG |
| | TATAGAAATATTTTCCTTTGTCTTGTATTCTGTTGTTTTGAATGAATAAAA |
| | CACAATGTTTCACGATCACTACTTTCATTTGCCATGGAGAAATAGCAGGGA |
| | AAAATTTCTACAGAATAAAATTAACTGATGAATTACATGCAGAAAAAATTC |
| | AAATCAATGATACATTGTAATTTTTATCTCAATGCAATGTTCTTTGTATTT |
| | TATTTTATTATTATTTTTTTGAGACGGAGTTTCACTTTTGTTGCCCGGGCT |
| | GGAGTGCAATGGCACAATCTCGGCTCACCACAACCTCTGCCTCCCGGATTC |
| | AAGTGATTCTCCTGCCTCAGCCTCCTGAATAGCTGGGATTACAGGCATATG |
| | CCAACATGCCTGGCTAATTTTGTATTTTTAGTGGAGACGGGGTTTCTCCAC |
| | GTTGGTCAGACTTGTCTTGAACTCTGGACCTCAGGTGATCCACCTGCCTCA |
| | GCCTCCTAAATTGCTGGGATTACAGGCATGAGCGACCACTCCTGGCCTTGT |
| | TCTTTGTATTTTATAAGTGCATGTAGTGCAAAGGGTCAAAGGGCTTTACAG |
| | GTTTTTTGTTTGTTTGTTTTTGTTTTTCCCGAAACATAGTAGTCCCTTGCC |
| | CTTCCTCATTTTTGTTACCTTGAGACAACAAATTTTACTACTTCTAACTCA |
| | TTATTTTATTTATGTTCACTTTTCTGAATAGCATGCTTATGACACTAATAC |
| | TTTTTTTTTCAATTTTAGACATTCATTATTCATTTAGATGTCTTTCTCTCC |
| | CCAAACTCACCACATAAAATACTCTTCTCATGTCTCTTTCAGAAATATTTG |
| | TATTAAAATATGATTATATCAATATTTGGCATTTATTTCTTATGACCTTGC |
| | CAGTACTCTTAGTTAAACTACATGGTAAAAATGATTTTGCTTTCCCTCCTA |
| | CATAACTTTTTTTCCACCTAGAGCTAATAATTGTCATTCTGGGGACTGACT |
| | TTTTCTGTATTTACCATAAATTGACCTGAAACTCCCCTGTGATGCAGCAGG |
| | AATTCTACCAACGTCAACTTCCTTAGAAAGACTCCATTAGAAGCTTGACTT |
| | GGGGCTAGAAGGAGAGGCACACAACTGCCATCCTGGTGTCTCCCTTCATCC |
| | AGAAAAAGGGGGAGGAATACATGAAACCTAGAATCCACTCTAAAACATTTT |
| | CCAGAACAAAAGGACATGTGTTTCCGTGTTGTAAATGTTTAACGAGTGCCC |
| | ATAACAAGGAATAATAAGTCTATTATGTTTGCTTTTGTGTCTGTAAAAGTT |
| | GGGGGTATTGGTTGTAAGCACGAAAACAGATACTGACTGTTGAAGAAAAAA |
| | AAAAATACGAGGTCAGGAGTTTGAGACCAACTTGGCCAATATGGTGAAACC |
| | CTGTCTTAGTAAAAATAGAAAAATTAGCCAGGCCTGGTGGCACGCACCTGT |
| | AGTCCCAGCTACTTGGGAGGCTGAGGCAGAAGAATCGCTTGAACCCGGGAG |
| | GCAGAGGTTGCAGTGAGCCAAGATCGCACCACTGCACTCCACCCTGGGCAA |
| | CAGAGCGAGACTCCGTCTCAAAAAAAAAAAAAAAAAAAAAAAAAAAAAGTT |
| | AAGTATTTGAACATAGGGGTGGCTCATAGAATTCCCAGGACACCCGATGGA |
| | GTAGGCTTGCAAAACACAACATGTGGCAACTCCAGTGGGAAACGAGGCAGG |
| | AAACACTCGTTTCCTGCAGAAAGCAACAATTTGGGCTTCGATACCCTCCCT |
| | AGAACACAGGGCAGTGAATCTGAGCAGCATCAGTACCCCACGTTCGGATGA |
| | GTCCTGAGCCCCTATTTTTATTCACTGACTTATTCCAAAATCAGTGTCTCT |
| | TAAATATATCTGGAAGGCAGCAGCTTGTATCTCCCCCTTCAGCTTCCATAG |
| | TGGCAGTCAGGGTACAACTTACTTTCCAAACAGAACACACTGCGACATTCC |
| | CTCCAGGCTCGTTGAAGAACTTCAACTGACAAATGTCCCTCCTCGACCAGA |
| | TGATAGTTTTCTTAAAGGCAGGGTTTAATATACCCTTTTATAAATGTTTCA |
| | AGGCCCTGTGTAATACCTGAGTTTATTCCAGATGTAACTAAATATATCCAA |
| | GATTGTTTTAAAATAAATTGCTGAAAAAACAAATAAATACAGTTAGTATCT |
| | ATATCAATATTCTCAGTTGGCAGTTTTGCAATAATGGCCGATAGTTCATTT |
| | TTAGTAACACTATTGACATTGCATTTGGATATTAGGGTTTACTAATCATCC |
| | GCATGTATACATTGCATATTTTTCTAGACTTTAACTTTATTCAAATCTATT |
| | GATTTTTAAACCTGCAACTTATGTCTAGACACAGGTATACCTTTACAAGAA |
| | CTACCATTTTTTTTGGTAACATACTACCTCCAAAATTTCAAGTAAGAAGTT |
| | GATTTTTGTCCATTTTTAAATGGAAAACTTGTAATCAAAATGCCACAAAAT |
| | TATACTGTGTATCATTTGACCTATAGAAACCAATATTATTACAGGAAGAAA |
| | GCAGAGCCAATCTTCTACCTGTGGTCAAATAAGTGGAGGCCCTTTCTAGAC |
| | TAAGTTCTCATGAGTTTAAAATACCAAGCATAAGTTCTCCAAATTCCTGAA |
| | AAGGAAGCCTTGTGTTGTATTGCCCAGCCATATTTGTAAGACATAAAAATA |
| | AAACTTGAGAAGAAGCTATGATAACTTACTTTCTTCATTCTTCAAAATTTA |
| | CATAATCTCAACTGATTTTATGTTTTTATGAAAATGCATTCTTAAGATATA |
| | TCCTTATTCAATCATGTATTCATTACATCCTTTATGCCAGGTATCCAAAAG |
| | TACTTACAGTGACTAAGACCATTATTCTTTGATCAGCTGCCTGAGTAAGAC |
| | TTTGAGCTCTCCAATATACTCTCAGTGATACTAAGTTTTCTGAGTAACAGC |
| | TTTGGATGTGGCTTCAGTTGAGCTGATTTATCCCACACTTTATTTTTATCG |
| | TATAATGGTCCTCAGAAGCAAATTTTGATTTTAGCTCACATAAAAAATGTA |
| | CAAAGAAATGTAATGGCTCAGTAGCTTCTAGAGATAGAGATTACTCTTCTA |
| | ACCTTTCTGTAATTTTGTATGTCTATTTTATAATTCTTTCAATGTCTAATG |
| | AATAGCTATCTTTTTTTGAGACGGAGTCTCGCTCTGTCGCCCAGGCTGGAG |
| | TGCAGTGGTGCGACCTCGGCTCACCGCAAGCTGCGTCTTCCAGGTTCACGC |
| | CATTCTCCTGCCTCAGCCTCCCGAGTAGCTGGGACTTCAGGCGCCCACCAC |
| | CATGCCCAGCTAATTTTTTTGTATTTTTAGTAGAGACGGGGTTTCACCGTG |
| | TTAGCCAGGGTGGTCTCGATCTCCTGACCTCGTGATCCGCCCGCCTCGGCC |
| | TCCCAACGTGCTGGGATTACAGGAGTGAGCCACCGCGCCCGGCCTCCTTAG |
| | TTTCTTAAGGTGGAAGCCTAGATTATTGATTTTATATGTTGTTTTCTTTTC |
| | CAATAGTGGCACTTAATGCTATAAATTTCACTTTGTTCCACAAGTTTTGGT |
| | AAGCTCTATTTTTATTTTCATTTAGTCCAAAATATTTTAAAATTTCTTTTG |
| | ATATTTCTTCTTTGAGCCATGAATTATTTACAATGTGTTGTTTAATCTCTA |
| | TATATTTTGGGATTTTTCTACTTTATATCTCTTACAGATTTCTAACTTAAT |
| | TTCATCATGTTTTAAAAACATTCTTTGTATAATTTCTATTCTTTTAAATTT |
| | TTCAGGTGTATTTTATGGCCCAGAATATGGTCTATCTTGTAGAATGTTTCA |
| | TGTGATCTTAAGAAGAATGTTCATTCTGCTGTTGAGTGTAATATTCTACAA |
| | ATGTCCATTAGATTAAACTGATTGATACCACCGTTCAGATTATCTATATCC |
| | TTTCTGATTTTCCCTCTTCTTGATCTATCACATACTGACAGATCAAGTGAT |
| | CAAGTCTCGTTAAAGACTGCAAGTAAAATAGTGGATTTTTCTATTTCTCCT |
| | TGCAGTTTTGTTAGTTTTTGTCTCATGTATCTTGATACTCTTGTTAGTACA |
| | TATACTTTCAGAATCGTTAGGTTTTCTTGGAGAATTGACCCCTTTACCACA |
| | TGTAATGTCCCTTTTATTCTTGATAATCTTTCTTGTTCTGTCTGCTTTTTC |
| | TGATATTAACATAACTTTCAGTTTTTTAAAAAATTAACATTAGCATCTCAC |
| | ATCTTTATCCTTTTAATTTTAAATTATCTAAATATTTATATTTAATGTGCC |
| | TTTCTTATAGACAATGTATAGTTGCGTCTATTTGTAATTTCCCCACTTTTC |
| | TTACTTAAAAATGTTGTAGATATATAGGAGTTGTATATATTTGGGGGGTAC |
| | ATGTGATGTTTTGATACCTGTATACAATATGTAATGATCATATTGGGTAAT |
| | CGTGATATCTGTCACCTCTAACATTCATCTTTTTTGTGTGTTTAAACCCAC |
| | CACTTCTAATTGGTACATTTAGATTATTCAAATTTAAGTGATTATTGATAT |
| | AGTTGGATTAATATCTACTATGTTTGTAACTTTTCTATCCTTGCACTCGTT |
| | CTTTCTTTTTTATCCTCCTTTTTCTGTGTTCTCTGATTTTAACTGGGGTTT |
| | TTACATGATTTAATTTTCTCTCGTGGCATATCTTTCATTGATCAACCTAGG |
| | TTTTTCTCCTTTTCCCCTCTTTTTTTTGGTATTTATTCTATTTAGTGTTAT |
| | CTGAGCTACCTGAGTTGGTGTCTATCACTAATTTTGGCAAGTTCCCAGACG |
| | TTATTACTTCTAACATTCTTTTGCTCCATTCTTTCTTCTTCTTCAATTATT |
| | CCATAGTCTTGAATATTCTGGGTTTTTCCCACTCTTTGAATTTTAGTTTGA |
| | AAAGTTTCTATTGGCCTAGCTTCAAAGTCATTCATTCTTCCTTCGGGGTTC |
| | CAAGTCAACTGATAATTGCATCAAAGATATCCTTCCTTTCTATTACTATGT |
| | TTTTTATTGCTACCATTTCTTTTTTATTCCTTCTTAGTGTTTCCATCTTTC |
| | TTCTTACATTATCCATCTGTTGTCTATTTTTTTCATGAGAGCTCTTAACAT |
| | ATTAATGATAAGTTCCATGTCTGATAATTCTGACACGTGTCATGTCTCTAT |
| | CTGGTTCCAATGATTGCTTTATCTCTTCAGACCATGACTTTTCTTGCCTTT |
| | TGACGTTCTTTGACATTTTTTTTGAATTTTTTGTTGCAAGCCAGATCTGGT |
| | GTGTTATGTAATAGGAACAGGTAAATAAGTCTTTAGCTTGCAGACTTATCT |
| | TAATCTGACTAACTATTAGACTGTGTTTAAAGTCTGTTATAACCATAGGTG |
| | CTAAATTTCTTCAAATTCCTCTAGTGTCTTTGTTTTGTTTGTTCATGTGTT |
| | TTTCCCCTTCTTGAGTTCAGGCTTCCCTAAGTGCTCCTCTTCAGAGAGACT |
| | TTCTGTCTTTCAGCTCTTTCCTCTGCAATTCACTGTTACTATACTGGAGCC |
| | CTGTTGGTGTAGTACTAAGCTGTGGGAAAGGAGAGTGCTCTGTAATCTTAC |
| | AGTGAAATCTCAGTCTTTTAGTGGGTCTGTGTCTGGGACATTCACAGAGCT |
| | TCTCCAGTGGTATTGCTTCCTCATCCTCAACTCTCTTTCCTGGCTGCAGCA |
| | TTCCCAATGTATTTCTTTGAAGGCCTGCCCCCTGTTGACTGTTATTTTCCC |
| | TCTTTCCTTAAGTGGGACAGGGAGACTTCAGGGGCTGGGATGAGGTTTGGG |
| | AATTGTGCTTGGCAGAGTCCTTTCCATCTTTGTTACCAAGAAGGTTCATGG |
| | CTTATTTCTCAATGGATGTCCCTCTCTATCTGTTGCCAGAGCCACGAGGAA |
| | ATTTTTCTTGGATCCTCATAATGAGAACCTTGGAGTTTCCTACTGGAAAAG |
| | CCCTTGAATGTGTGGAGTGCCTCAAGAGCACAGCCCCCATGGGTTTCTTGC |
| | TCACACCAGTCCACAAACAGATGCCAGCAATTCACCCAACTTACCATATAA |
| | AGGCTCATACTAGTTTATGGCTCCAGTGCTTTGACTCCAGATAAATGGCTA |
| | TTGGTTGCGTATCTCTCTGGATGTATCTGTATCTCCAGATTTTGGGGTGGC |
| | AGTTTGCTCAGGACCTTGGTTCTCTAATAGGTCTAATAAGAAAAGTCATTG |
| | ATTTTCAGCTTTCCAACTTTCCAGCTTTGTCTTGTTATAAGCATGGCAGCA |
| | ACATCTTCCATGCCTTAACATGATGACACTAAAGGCAGAAGTCGATCTCCA |
| | TGTATAAACATTTTAACACATATGTTTTTTGTTATCGTGGTTTCTGACCTG |
| | TCTCTTTGCCCTGACTTTCTGATACTGCACTAGGGTTCCTGTTGCTGGACT |
| | CCATTCCATATGACTTGCTCTCGTCTAGGCTGCTCTTTGGCTCATCTTTAT |
| | AAATCATGATCCAAAATGAAGCACATATTTATTTTTTAAATAAATATGAAA |
| | TGAAGTATAGACATCAAACTGAAGATGAGTAGATCATACTGAGTTTCACTG |
| | TCTGTGCTTGGATCAACATCAGGCCTTATACAAATATTCAAGTCCAGAGGC |
| | AAAAGGTAATAAGGAAAATTTGTAGCACAAGCCACAAGGAGATAACATGTC |
| | AAGTCTATGCGATTGGAAATAAACTAAAGATGAACTGCTGGGGATGCTCAC |
| | TCATCACAGAGCTCAGTCTAAAGCACCAGATTTCACAAGCATTTTTTGGGG |
| | GAAATTCTGTTAAAATGAAATATGAGTCACATGGTGGTGTTTCACTCATCA |
| | TATGTGTTCAATATTAATTCATTTTAAGGTTTAGTTGCACAAAAGGTAAAT |
| | GAGAATTAGAAGACTCCATGGGTAAGAGGAGCCACAGAAGTAAAGCATTGT |
| | CAAGGGTTCTATGTCTATATATTTAGATATTAGGCTTCTGAGAAAAAAACA |
| | CAATAGGAAGGAAGATGAACACAACAGAGGGCAGAAGGTCTATACGTCCTG |
| | AGGCCTTTTATGCAACGTTTGTTTGTGGAATGTTTTTTAAGAATGTGTGAG |
| | AGTCATTTTAATGTGAAATAAAGACCTACGTCTACA (SEQ ID NO: 171) |
| | >NP_006557.2 CD226 antigen isoform a precursor [Homo |
| | sapiens] |
| | MDYPTLLLALLHVYRALCEEVLWHTSVPFAENMSLECVYPSMGILTQVEWF |
| | KIGTQQDSIAIFSPTHGMVIRKPYAERVYFLNSTMASNNMTLFFRNASEDD |
| | VGYYSCSLYTYPQGTWQKVIQVVQSDSFEAAVPSNSHIVSEPGKNVTLTCQ |
| | PQMTWPVQAVRWEKIQPRQIDLLTYCNLVHGRNFTSKFPRQIVSNCSHGRW |
| | SVIVIPDVTVSDSGLYRCYLQASAGENETFVMRLTVAEGKTDNQYTLFVAG |
| | GTVLLLLFVISITTIIVIFLNRRRRRERRDLFTESWDTQKAPNNYRSPIST |
| | SQPTNQSMDDTREDIYVNYPTFSRRPKTRV (SEQ ID NO: 172) |
| Mouse CD226 | >NM_178687.2 Mus musculus CD226 antigen (Cd226), |
| | transcript variant 1, mRNA |
| | ACACAGAAGACTTCTTGACTTCAGGAGACACTGCTGTATGAAACAGTGCTT |
| | GCTATCAGTGGCTGCTGGAAGAGGCTGTGGTGGAAAGAAAACCTCAACTGC |
| | AGGCCAGAGTTGGTTCCCCAAAAGAGGCAAACTCCCAGTGCTAGCCAGAGG |
| | CTAGGAAGCTCTAAGCAACCCACTTATCTGCAAGGAGAGTTACGCCCAAAG |
| | AGCATCAAGTCCAACCTCCTGAACTGTTTCCAGAGATGGCTTATGTTACTT |
| | GGCTTTTGGCTATTCTTCATGTGCACAAAGCACTGTGTGAAGAGACATTGT |
| | GGGACACAACAGTTCGGCTTTCTGAGACTATGACTCTGGAATGTGTATATC |
| | CATTGACGCATAACTTAACCCAGGTGGAGTGGACCAAGAACACTGGCACAA |
| | AGACAGTGAGCATAGCAGTTTACAACCCTAACCATAATATGCATATAGAAT |
| | CTAACTACCTCCATAGAGTACACTTCCTAAACTCAACAGTGGGGTTCCGCA |
| | ACATGAGCCTTTCCTTTTACAATGCCTCAGAAGCAGACATTGGCATCTACT |
| | CCTGCTTGTTTCATGCTTTCCCAAATGGACCTTGGGAAAAGAAGATAAAAG |
| | TAGTCTGGTCAGATAGTTTTGAGATAGCAGCACCCTCGGATAGCTACCTGT |
| | CTGCAGAACCTGGACAAGATGTCACACTCACTTGCCAGCTTCCAAGGACTT |
| | GGCCAGTGCAACAAGTCATATGGGAAAAAGTCCAGCCCCATCAGGTAGACA |
| | TCTTAGCTTCCTGTAACCTATCTCAAGAGACAAGATACACTTCAAAGTACC |
| | TAAGACAAACAAGGAGCAACTGTAGCCAGGGGAGCATGAAGAGCATCCTCA |
| | TCATTCCAAATGCCATGGCCGCTGACTCAGGACTTTACAGATGTCGCTCAG |
| | AGGCCATTACAGGAAAAAACAAGTCCTTTGTCATAAGGCTGATCATAACTG |
| | ATGGTGGAACCAATAAACATTTTATCCTTCCCATCGTTGGAGGGTTAGTTT |
| | CACTGTTACTTGTCATCCTAATTATCATCATTTTCATTTTATATAACAGGA |
| | AGAGACGGAGACAGGTGAGAATTCCACTTAAAGAGCCCAGGGATAAACAGA |
| | GTAAGGTAGCCACCAACTGCAGAAGTCCTACTTCTCCCATCCAGTCTACAG |
| | ATGATGAAAAAGAGGACATTTATGTAAACTATCCAACTTTCTCTCGAAGAC |
| | CAAAACCAAGACTCTAAGCTGCTCTTTTGGCCTGAACACATTAGTGATGAC |
| | TTCTATGGCATGGAATTTTACCCATGATTTCCTTACCACTAGGATCTACAT |
| | TGATAAAAAAAATTGATTAAATTTATTTCATCTCATATATAGAAGTACTTT |
| | ATTACCTGGAAACATTCTTAATAGAGATTCATTAGAAAACCCAAATCTAAT |
| | GTTCATGTGTTCAAGGAACCTTCTTCCATTATGTAACAGAACAGTCTAGAG |
| | AAGATTAAGGACCACATGGCTTTCTTGCTCTACTTGAAATTAATTGTGAGC |
| | ATAAGCTTGTTTCTGGAGTCTTCTTACATTGTTGGTTCTACTTACATACTA |
| | CTGGTCCAACTCTCATGCTGTTTCTCTCAGATGTTCCCATGATGGTTGCCA |
| | AGGACACTTGATAGAAAGACTACTGGTTAAACACAATAAACAAAGTTCATT |
| | ATTCACTTATTAGCAAGAAGGTAGCATTATCATAAAGGATTAGATGACTTA |
| | AGTTAGCTATAGGTTCAAGACCTGGACTAAAGTATTACTTGGAAATTCTGA |
| | GTATTGCTAAAAAGGAGGATGAAAGGGACCTAGAAGTTGAGTTATTACTAA |
| | AAACTTTGAGTGCGAAGATATTACTCATTAACCAGATAACAAGTGAATATG |
| | CTGTAGCATCAACATAATTCAAAAGAGTAAAGAAATGGCTAGGAATGAGGT |
| | AGTTGTGTAATTATTTCTTCTCTTACTAGTTTCAAATAAATTCATCTCTAA |
| | TTCTATAGAGAATTCTTGCCTCCCATTCAGGACTGGCCTTCTATACAGTGA |
| | GATGGTCCAGTAAGAAATAATTTTTATTAGTGTTTTTTCTATTTTGAGAAT |
| | TATTTTAATATATATTTTAATATATAAACTTGTGAGTTAAATTTTTTTTTT |
| | GCAAAATTAGCACATGAAAAGAGATTGATGGTTTTAAGTAGTAGAACACAG |
| | TAGTGTAGGAATCTGAGAGCAGAGAGTTTGGGAGGGGGTGAAGAGAAAACA |
| | ACATCACCAAATAGTGATATATAAGAGAAAATCTGTGCTTCAGAGTTTGAT |
| | CAGGGCCATCTCTCCCAACTCTGCTGGAACTGAGAGAATGCACCTGATGTT |
| | GTCTCCATTTTAGATAGAGAAAAAAAAAACCCGAATATTTATAAAACTAAA |
| | TAAAACTATAGTTACCTCAAAACTATGGGGATCACTATAACATAGAATAGA |
| | ATAGAATAGAATAGAATAGAATAGAATAGAATAGAATAG (SEQ ID NO: |
| | 173) |
| | >NP_848802.2 CD226 antigen isoform a precursor [Mus |
| | musculus] |
| | MAYVTWLLAILHVHKALCEETLWDTTVRLSETMTLECVYPLTHNLTQVEWT |
| | KNTGTKTVSIAVYNPNHNMHIESNYLHRVHFLNSTVGFRNMSLSFYNASEA |
| | DIGIYSCLFHAFPNGPWEKKIKVVWSDSFEIAAPSDSYLSAEPGQDVTLTC |
| | QLPRTWPVQQVIWEKVQPHQVDILASCNLSQETRYTSKYLRQTRSNCSQGS |
| | MKSILIIPNAMAADSGLYRCRSEAITGKNKSFVIRLIITDGGTNKHFILPI |
| | VGGLVSLLLVILIIIIFILYNRKRRRQVRIPLKEPRDKQSKVATNCRSPTS |
| | PIQSTDDEKEDIYVNYPTFSRRPKPRL (SEQ ID NO: 174) |
| Human DR3 | >NM_003790.3 Homo sapiens TNF receptor superfamily |
| | member 25 (TNFRSF25), transcript variant 2, mRNA |
| | GAAGGCGGAACCACGACGGGCAGAGAGCACGGAGCCGGGAAGCCCCTGGGC |
| | GCCCGTCGGAGGGCTATGGAGCAGCGGCCGCGGGGCTGCGCGGCGGTGGCG |
| | GCGGCGCTCCTCCTGGTGCTGCTGGGGGCCCGGGCCCAGGGCGGCACTCGT |
| | AGCCCCAGGTGTGACTGTGCCGGTGACTTCCACAAGAAGATTGGTCTGTTT |
| | TGTTGCAGAGGCTGCCCAGCGGGGCACTACCTGAAGGCCCCTTGCACGGAG |
| | CCCTGCGGCAACTCCACCTGCCTTGTGTGTCCCCAAGACACCTTCTTGGCC |
| | TGGGAGAACCACCATAATTCTGAATGTGCCCGCTGCCAGGCCTGTGATGAG |
| | CAGGCCTCCCAGGTGGCGCTGGAGAACTGTTCAGCAGTGGCCGACACCCGC |
| | TGTGGCTGTAAGCCAGGCTGGTTTGTGGAGTGCCAGGTCAGCCAATGTGTC |
| | AGCAGTTCACCCTTCTACTGCCAACCATGCCTAGACTGCGGGGCCCTGCAC |
| | CGCCACACACGGCTACTCTGTTCCCGCAGAGATACTGACTGTGGGACCTGC |
| | CTGCCTGGCTTCTATGAACATGGCGATGGCTGCGTGTCCTGCCCCACGAGC |
| | ACCCTGGGGAGCTGTCCAGAGCGCTGTGCCGCTGTCTGTGGCTGGAGGCAG |
| | ATGTTCTGGGTCCAGGTGCTCCTGGCTGGCCTTGTGGTCCCCCTCCTGCTT |
| | GGGGCCACCCTGACCTACACATACCGCCACTGCTGGCCTCACAAGCCCCTG |
| | GTTACTGCAGATGAAGCTGGGATGGAGGCTCTGACCCCACCACCGGCCACC |
| | CATCTGTCACCCTTGGACAGCGCCCACACCCTTCTAGCACCTCCTGACAGC |
| | AGTGAGAAGATCTGCACCGTCCAGTTGGTGGGTAACAGCTGGACCCCTGGC |
| | TACCCCGAGACCCAGGAGGCGCTCTGCCCGCAGGTGACATGGTCCTGGGAC |
| | CAGTTGCCCAGCAGAGCTCTTGGCCCCGCTGCTGCGCCCACACTCTCGCCA |
| | GAGTCCCCAGCCGGCTCGCCAGCCATGATGCTGCAGCCGGGCCCGCAGCTC |
| | TACGACGTGATGGACGCGGTCCCAGCGCGGCGCTGGAAGGAGTTCGTGCGC |
| | ACGCTGGGGCTGCGCGAGGCAGAGATCGAAGCCGTGGAGGTGGAGATCGGC |
| | CGCTTCCGAGACCAGCAGTACGAGATGCTCAAGCGCTGGCGCCAGCAGCAG |
| | CCCGCGGGCCTCGGAGCCGTTTACGCGGCCCTGGAGCGCATGGGGCTGGAC |
| | GGCTGCGTGGAAGACTTGCGCAGCCGCCTGCAGCGCGGCCCGTGACACGGC |
| | GCCCACTTGCCACCTAGGCGCTCTGGTGGCCCTTGCAGAAGCCCTAAGTAC |
| | GGTTACTTATGCGTGTAGACATTTTATGTCACTTATTAAGCCGCTGGCACG |
| | GCCCTGCGTAGCAGCACCAGCCGGCCCCACCCCTGCTCGCCCCTATCGCTC |
| | CAGCCAAGGCGAAGAAGCACGAACGAATGTCGAGAGGGGGTGAAGACATTT |
| | CTCAACTTCTCGGCCGGAGTTTGGCTGAGATCGCGGTATTAAATCTGTGAA |
| | AGAAAACAAAACAAAACAAAAACGGCTTCTTGGCGTTTCTGCGGGGCTGGG |
| | GTGTTAAGTGGACTGGACTTTTCTCGAGGGATTCGAAGGGGACGGGAATCT |
| | TGTCACCCCGGGATCTGGCACCCATGGTGGAGTCCAGTGTGGCCTTAGCTC |
| | CCAAGCCTGCCCCTCCCGAGTCCACTCTGGCTCAATTACCCCGAGAAGGAG |
| | AGAGCAAGTCGCGGCCACAGCGAGTGAGTGAACCGGAGCCCAGATGAGAGC |
| | GCTTTAATGGGGCTGCGAGGTGGCGGAGACAGGGTCGGGATGGGGTGCAGC |
| | AGTTGGAGACACAGGGTCAGGGCCCCTCATCCTCTATTCACTCCACCGGGG |
| | CAGTGAAAGGGTCCCGGCAGCGAGTGGGTC (SEQ ID NO: 175) |
| | >NP_003781.1 tumor necrosis factor receptor |
| | superfamily member 25 isoform 2 precursor [Homo |
| | sapiens] |
| | MEQRPRGCAAVAAALLLVLLGARAQGGTRSPRCDCAGDFHKKIGLFCCRGC |
| | PAGHYLKAPCTEPCGNSTCLVCPQDTFLAWENHHNSECARCQACDEQASQV |
| | ALENCSAVADTRCGCKPGWFVECQVSQCVSSSPFYCQPCLDCGALHRHTRL |
| | LCSRRDTDCGTCLPGFYEHGDGCVSCPTSTLGSCPERCAAVCGWRQMFWVQ |
| | VLLAGLVVPLLLGATLTYTYRHCWPHKPLVTADEAGMEALTPPPATHLSPL |
| | DSAHTLLAPPDSSEKICTVQLVGNSWTPGYPETQEALCPQVTWSWDQLPSR |
| | ALGPAAAPTLSPESPAGSPAMMLQPGPQLYDVMDAVPARRWKEFVRTLGLR |
| | EAEIEAVEVEIGRFRDQQYEMLKRWRQQQPAGLGAVYAALERMGLDGCVED |
| | LRSRLQRGP (SEQ ID NO: 176) |
| Mouse DR3 | >NM_033042.4 Mus musculus tumor necrosis factor |
| | receptor superfamily, member 25 (Tnfrsf25), |
| | transcript variant 2, mRNA |
| | CTGCGTGGAGGGGAAATGGGCCAGAGGCTGCTGGCAGGGGGCCTCCTCTGC |
| | TGTACACAAGCTGGTTTTGTAGACAGTGAGAGGGAAGCTGATCCCAGTCCC |
| | CTAACCCTGTTCTGCCCAGGAGCCTGAGAACTGAGCTTACTCGGGCAAATG |
| | CTAGGGCTTCAGAAATGGAGGAGCTGCCTAGGAGGGAGAGGTCACCTCCTG |
| | GGGCAGCCACACCAGGGTCAACTGCACGTGTTCTCCAGCCTCTGTTCCTAC |
| | CACTGCTGCTGCTGCTGCTGCTGCTGCTTGGTGGCCAGGGCCAGGGCGGCA |
| | TGTCTGGCAGGTGTGACTGTGCCAGTGAGTCCCAGAAGAGGTATGGCCCGT |
| | TTTGTTGCAGGGGCTGCCCAAAGGGACACTACATGAAGGCCCCCTGCGCAG |
| | AACCCTGTGGCAACTCCACCTGCCTTCCCTGTCCCTCGGACACCTTCTTGA |
| | CCAGAGACAACCACTTTAAGACTGACTGTACCCGCTGCCAAGTCTGTGATG |
| | AAGAGGCCCTTCAAGTGACCCTTGAGAACTGCTCGGCAAAGTCGGACACCC |
| | ACTGTGGCTGCCAGTCAGGCTGGTGTGTTGACTGCTCCACCGAGCCATGTG |
| | GGAAAAGCTCACCTTTCTCTTGTGTCCCATGCGGGGCTACAACACCAGTCC |
| | ATGAGGCTCCAACCCCCCTGTTTTGGGTCCAGGTGCTTCTAGGAGTCGCGT |
| | TCCTTTTTGGGGCTATCCTGATCTGTGCATATTGTCGATGGCAGCCTTGTA |
| | AGGCCGTGGTCACTGCAGACACAGCTGGGACGGAGACCCTGGCCTCACCAC |
| | AGACTGCCCATCTCTCAGCCTCAGACAGCGCCCACACCCTCCTGGCACCTC |
| | CAAGCAGTACTGGGAAAATCTGTACCACTGTCCAGTTGGTAGGCAACAACT |
| | GGACCCCTGGCTTATCCCAGACTCAGGAGGTGGTCTGCGGACAGGCCTCAC |
| | AACCCTGGGATCAGCTGCCAAACAGAACTCTTGGAACTCCTCTGGCATCTC |
| | CGCTCTCGCCAGCGCCCCCTGCGGGCTCTCCGGCTGCTGTGCTCCAGCCTG |
| | GCCCGCAGCTCTACGATGTGATGGATGCGGTCCCAGCACGAAGGTGGAAGG |
| | AGTTCGTGCGCACGCTGGGGCTGCGGGAAGCGGAAATTGAAGCCGTGGAGG |
| | TGGAAATCTGCCGCTTCCGAGACCAGCAGTATGAGATGCTCAAGCGCTGGC |
| | GTCAGCAGCAGCCTGCAGGCCTCGGTGCCATCTATGCGGCTCTGGAGCGCA |
| | TGGGTCTGGAAGGCTGTGCCGAGGACCTGCGCAGCCGCCTGCAGCGTGGCC |
| | CGTGATGGAAGGTCCATCAGCCACTTTGACACCCTAGTGACCCTTGAAGGA |
| | GCCTTAAGTATTGTTACTTATGCGTGTAGACATTTTATGTCAATTACTAAC |
| | CCCCTGCCGTGGTCCTGCGTAGCAGGGCTGGCTGCCTCACTTTTGCTTATC |
| | TGCAGCACGGAGCTCCTGCTAAGGGAAGCGTCATGGAGAAATACCAGAAGG |
| | GGCCAAGTGATTGGTTGCTCAGCTGTTAATTAGCCCGAGTTTGGACTTGGT |
| | ATTAAATTTCGTAAGAAAAGCAGCTGCTTG (SEQ ID NO: 177) |
| | >NP_149031.2 tumor necrosis factor receptor |
| | superfamily member 25 isoform 2 precursor [Mus |
| | musculus] |
| | MEELPRRERSPPGAATPGSTARVLQPLFLPLLLLLLLLLGGQGQGGMSGRC |
| | DCASESQKRYGPFCCRGCPKGHYMKAPCAEPCGNSTCLPCPSDTFLTRDNH |
| | FKTDCTRCQVCDEEALQVTLENCSAKSDTHCGCQSGWCVDCSTEPCGKSSP |
| | FSCVPCGATTPVHEAPTPLFWVQVLLGVAFLFGAILICAYCRWQPCKAVVT |
| | ADTAGTETLASPQTAHLSASDSAHTLLAPPSSTGKICTTVQLVGNNWTPGL |
| | SQTQEVVCGQASQPWDQLPNRTLGTPLASPLSPAPPAGSPAAVLQPGPQLY |
| | DVMDAVPARRWKEFVRTLGLREAEIEAVEVEICRFRDQQYEMLKRWRQQQP |
| | AGLGAIYAALERMGLEGCAEDLRSRLQRGP (SEQ ID NO: 178) |
| Human DcR3 | >NM_003823.4 Homo sapiens TNF receptor superfamily |
| | member 6b (TNFRSF6B), mRNA |
| | GGACTTGGGCGGCCCCTCCGCAGGCGGACCGGGGGCAAAGGAGGTGGCATG |
| | TCGGTCAGGCACAGCAGGGTCCTGTGTCCGCGCTGAGCCGCGCTCTCCCTG |
| | CTCCAGCAAGGACCATGAGGGCGCTGGAGGGGCCAGGCCTGTCGCTGCTGT |
| | GCCTGGTGTTGGCGCTGCCTGCCCTGCTGCCGGTGCCGGCTGTACGCGGAG |
| | TGGCAGAAACACCCACCTACCCCTGGCGGGACGCAGAGACAGGGGAGCGGC |
| | TGGTGTGCGCCCAGTGCCCCCCAGGCACCTTTGTGCAGCGGCCGTGCCGCC |
| | GAGACAGCCCCACGACGTGTGGCCCGTGTCCACCGCGCCACTACACGCAGT |
| | TCTGGAACTACCTAGAGCGCTGCCGCTACTGCAACGTCCTCTGCGGGGAGC |
| | GTGAGGAGGAGGCACGGGCTTGCCACGCCACCCACAACCGTGCCTGCCGCT |
| | GCCGCACCGGCTTCTTCGCGCACGCTGGTTTCTGCTTGGAGCACGCATCGT |
| | GTCCACCTGGTGCCGGCGTGATTGCCCCGGGCACCCCCAGCCAGAACACGC |
| | AGTGCCAGCCGTGCCCCCCAGGCACCTTCTCAGCCAGCAGCTCCAGCTCAG |
| | AGCAGTGCCAGCCCCACCGCAACTGCACGGCCCTGGGCCTGGCCCTCAATG |
| | TGCCAGGCTCTTCCTCCCATGACACCCTGTGCACCAGCTGCACTGGCTTCC |
| | CCCTCAGCACCAGGGTACCAGGAGCTGAGGAGTGTGAGCGTGCCGTCATCG |
| | ACTTTGTGGCTTTCCAGGACATCTCCATCAAGAGGCTGCAGCGGCTGCTGC |
| | AGGCCCTCGAGGCCCCGGAGGGCTGGGGTCCGACACCAAGGGCGGGCCGCG |
| | CGGCCTTGCAGCTGAAGCTGCGTCGGCGGCTCACGGAGCTCCTGGGGGCGC |
| | AGGACGGGGCGCTGCTGGTGCGGCTGCTGCAGGCGCTGCGCGTGGCCAGGA |
| | TGCCCGGGCTGGAGCGGAGCGTCCGTGAGCGCTTCCTCCCTGTGCACTGAT |
| | CCTGGCCCCCTCTTATTTATTCTACATCCTTGGCACCCCACTTGCACTGAA |
| | AGAGGCTTTTTTTTAAATAGAAGAAATGAGGTTTCTTAAAGCTTATTTTTA |
| | TAAAGCTTTTTCATAAAA (SEQ ID NO: 179) |
| | >NP_003814.1 tumor necrosis factor receptor |
| | superfamily member 6B precursor [Homo sapiens] |
| | MRALEGPGLSLLCLVLALPALLPVPAVRGVAETPTYPWRDAETGERLVCAQ |
| | CPPGTFVQRPCRRDSPTTCGPCPPRHYTQFWNYLERCRYCNVLCGEREEEA |
| | RACHATHNRACRCRTGFFAHAGFCLEHASCPPGAGVIAPGTPSQNTQCQPC |
| | PPGTFSASSSSSEQCQPHRNCTALGLALNVPGSSSHDTLCTSCTGFPLSTR |
| | VPGAEECERAVIDFVAFQDISIKRLQRLLQALEAPEGWGPTPRAGRAALQL |
| | KLRRRLTELLGAQDGALLVRLLQALRVARMPGLERSVRERFLPVH (SEQ |
| | ID NO: 180) |
| Human FasL | >NM_000639.3 Homo sapiens Fas ligand (FASLG), |
| | transcript variant 1, mRNA |
| | AGCAGTCAGCAACAGGGTCCCGTCCTTGACACCTCAGCCTCTACAGGACTG |
| | AGAAGAAGTAAAACCGTTTGCTGGGGCTGGCCTGACTCACCAGCTGCCATG |
| | CAGCAGCCCTTCAATTACCCATATCCCCAGATCTACTGGGTGGACAGCAGT |
| | GCCAGCTCTCCCTGGGCCCCTCCAGGCACAGTTCTTCCCTGTCCAACCTCT |
| | GTGCCCAGAAGGCCTGGTCAAAGGAGGCCACCACCACCACCGCCACCGCCA |
| | CCACTACCACCTCCGCCGCCGCCGCCACCACTGCCTCCACTACCGCTGCCA |
| | CCCCTGAAGAAGAGAGGGAACCACAGCACAGGCCTGTGTCTCCTTGTGATG |
| | TTTTTCATGGTTCTGGTTGCCTTGGTAGGATTGGGCCTGGGGATGTTTCAG |
| | CTCTTCCACCTACAGAAGGAGCTGGCAGAACTCCGAGAGTCTACCAGCCAG |
| | ATGCACACAGCATCATCTTTGGAGAAGCAAATAGGCCACCCCAGTCCACCC |
| | CCTGAAAAAAAGGAGCTGAGGAAAGTGGCCCATTTAACAGGCAAGTCCAAC |
| | TCAAGGTCCATGCCTCTGGAATGGGAAGACACCTATGGAATTGTCCTGCTT |
| | TCTGGAGTGAAGTATAAGAAGGGTGGCCTTGTGATCAATGAAACTGGGCTG |
| | TACTTTGTATATTCCAAAGTATACTTCCGGGGTCAATCTTGCAACAACCTG |
| | CCCCTGAGCCACAAGGTCTACATGAGGAACTCTAAGTATCCCCAGGATCTG |
| | GTGATGATGGAGGGGAAGATGATGAGCTACTGCACTACTGGGCAGATGTGG |
| | GCCCGCAGCAGCTACCTGGGGGCAGTGTTCAATCTTACCAGTGCTGATCAT |
| | TTATATGTCAACGTATCTGAGCTCTCTCTGGTCAATTTTGAGGAATCTCAG |
| | ACGTTTTTCGGCTTATATAAGCTCTAAGAGAAGCACTTTGGGATTCTTTCC |
| | ATTATGATTCTTTGTTACAGGCACCGAGAATGTTGTATTCAGTGAGGGTCT |
| | TCTTACATGCATTTGAGGTCAAGTAAGAAGACATGAACCAAGTGGACCTTG |
| | AGACCACAGGGTTCAAAATGTCTGTAGCTCCTCAACTCACCTAATGTTTAT |
| | GAGCCAGACAAATGGAGGAATATGACGGAAGAACATAGAACTCTGGGCTGC |
| | CATGTGAAGAGGGAGAAGCATGAAAAAGCAGCTACCAGGTGTTCTACACTC |
| | ATCTTAGTGCCTGAGAGTATTTAGGCAGATTGAAAAGGACACCTTTTAACT |
| | CACCTCTCAAGGTGGGCCTTGCTACCTCAAGGGGGACTGTCTTTCAGATAC |
| | ATGGTTGTGACCTGAGGATTTAAGGGATGGAAAAGGAAGACTAGAGGCTTG |
| | CATAATAAGCTAAAGAGGCTGAAAGAGGCCAATGCCCCACTGGCAGCATCT |
| | TCACTTCTAAATGCATATCCTGAGCCATCGGTGAAACTAACAGATAAGCAA |
| | GAGAGATGTTTTGGGGACTCATTTCATTCCTAACACAGCATGTGTATTTCC |
| | AGTGCAATTGTAGGGGTGTGTGTGTGTGTGTGTGTGTGTGTGTGTGTATGA |
| | CTAAAGAGAGAATGTAGATATTGTGAAGTACATATTAGGAAAATATGGGTT |
| | GCATTTGGTCAAGATTTTGAATGCTTCCTGACAATCAACTCTAATAGTGCT |
| | TAAAAATCATTGATTGTCAGCTACTAATGATGTTTTCCTATAATATAATAA |
| | ATATTTATGTAGATGTGCATTTTTGTGAAATGAAAACATGTAATAAAAAGT |
| | ATATGTTAGGATACAAATAA (SEQ ID NO: 181) |
| | >NP_000630.1 tumor necrosis factor ligand superfamily |
| | member 6 isoform 1 [Homo sapiens] |
| | MQQPFNYPYPQIYWVDSSASSPWAPPGTVLPCPTSVPRRPGQRRPPPPPPP |
| | PPLPPPPPPPPLPPLPLPPLKKRGNHSTGLCLLVMFFMVLVALVGLGLGMF |
| | QLFHLQKELAELRESTSQMHTASSLEKQIGHPSPPPEKKELRKVAHLTGKS |
| | NSRSMPLEWEDTYGIVLLSGVKYKKGGLVINETGLYFVYSKVYFRGQSCNN |
| | LPLSHKVYMRNSKYPQDLVMMEGKMMSYCTTGQMWARSSYLGAVFNLTSAD |
| | HLYVNVSELSLVNFEESQTFFGLYKL (SEQ ID NO: 182) |
| Mouse FasL | >NM_010177.4 Mus musculus Fas ligand (TNF |
| | superfamily, member 6) (Fas1), transcript variant 1, |
| | mRNA |
| | TGAGGCTTCTCAGCTTCAGATGCAAGTGAGTGGGTGTCTCACAGAGAAGCA |
| | AAGAGAAGAGAACAGGAGAAAGGTGTTTCCCTTGACTGCGGAAACTTTATA |
| | AAGAAAACTTAGCTTCTCTGGAGCAGTCAGCGTCAGAGTTCTGTCCTTGAC |
| | ACCTGAGTCTCCTCCACAAGGCTGTGAGAAGGAAACCCTTTCCTGGGGCTG |
| | GGTGCCATGCAGCAGCCCATGAATTACCCATGTCCCCAGATCTTCTGGGTA |
| | GACAGCAGTGCCACTTCATCTTGGGCTCCTCCAGGGTCAGTTTTTCCCTGT |
| | CCATCTTGTGGGCCTAGAGGGCCGGACCAAAGGAGACCGCCACCTCCACCA |
| | CCACCTGTGTCACCACTACCACCGCCATCACAACCACTCCCACTGCCGCCA |
| | CTGACCCCTCTAAAGAAGAAGGACCACAACACAAATCTGTGGCTACCGGTG |
| | GTATTTTTCATGGTTCTGGTGGCTCTGGTTGGAATGGGATTAGGAATGTAT |
| | CAGCTCTTCCACCTGCAGAAGGAACTGGCAGAACTCCGTGAGTTCACCAAC |
| | CAAAGCCTTAAAGTATCATCTTTTGAAAAGCAAATAGCCAACCCCAGTACA |
| | CCCTCTGAAAAAAAAGAGCCGAGGAGTGTGGCCCATTTAACAGGGAACCCC |
| | CACTCAAGGTCCATCCCTCTGGAATGGGAAGACACATATGGAACCGCTCTG |
| | ATCTCTGGAGTGAAGTATAAGAAAGGTGGCCTTGTGATCAACGAAACTGGG |
| | TTGTACTTCGTGTATTCCAAAGTATACTTCCGGGGTCAGTCTTGCAACAAC |
| | CAGCCCCTAAACCACAAGGTCTATATGAGGAACTCTAAGTATCCTGAGGAT |
| | CTGGTGCTAATGGAGGAGAAGAGGTTGAACTACTGCACTACTGGACAGATA |
| | TGGGCCCACAGCAGCTACCTGGGGGCAGTATTCAATCTTACCAGTGCTGAC |
| | CATTTATATGTCAACATATCTCAACTCTCTCTGATCAATTTTGAGGAATCT |
| | AAGACCTTTTTCGGCTTGTATAAGCTTTAAAAGAAAAAGCATTTTAAAATG |
| | ATCTACTATTCTTTATCATGGGCACCAGGAATATTGTCTTGAATGAGAGTC |
| | TTCTTAAGACCTATTGAGATTAATTAAGACTACATGAGCCACAAAGACCTC |
| | ATGACCGCAAGGTCCAACAGGTCAGCTATCCTTCATTTTCTCGAGGTCCAT |
| | GGAGTGGTCCTTAATGCCTGCATCATGAGCCAGATGGAAGGAGGTCTGTGA |
| | CTGAGGGACATAAAGCTTTGGGCTGCTGTGTGACAATGCAGAGGCACAGAG |
| | AAAGAACTGTCTGATGTTAAATGGCCAAGAGAATTTTAACCATTGAAGAAG |
| | ACACCTTTACACTCACTTCCAGGGTGGGTCTACTTACTACCTCACAGAGGC |
| | CGTTTTTGAGACATAGTTGTGGTATGAATATACAAGGGTGAGAAAGGAGGC |
| | TCATTTGACTGATAAGCTAGAGACTGAAAAAAAGACAGTGTCTCATTGGCA |
| | CCATCTTTACTGTTACCTAATGTTTTCTGAGCCGACCTTTGATCCTAACGG |
| | AGAAGTAAGAGGGATGTTTGAGGCACAAATCATTCTCTACATAGCATGCAT |
| | ACCTCCAGTGCAATGATGTCTGTGTGTTTGTATGTATGAGAGCAAACAGAT |
| | TCTAAGGAGTCATATAAATAAAATATGTACATTATGGAGTACATATTAGAA |
| | ACCTGTTACATTTGATGCTAGATATCTGAATGTTTCTTGGCAATAAACTCT |
| | AATAGTCTTCAAAATCTTTTATTATCAGCTACTGATGCTGTTTTTCTTTAA |
| | TACAACTAGTATTTATGCTCTGAACATCCTAATGAGGAAAAGACAAATAAA |
| | ATTATGTTATAGAATACAGAAATGCCTTAAGGACATAGACTTTGGAAA |
| | (SEQ ID NO: 183) |
| | >NP_034307.1 tumor necrosis factor ligand superfamily |
| | member 6 isoform 1 [Mus musculus] |
| | MQQPMNYPCPQIFWVDSSATSSWAPPGSVFPCPSCGPRGPDQRRPPPPPPP |
| | VSPLPPPSQPLPLPPLTPLKKKDHNTNLWLPVVFFMVLVALVGMGLGMYQL |
| | FHLQKELAELREFTNQSLKVSSFEKQIANPSTPSEKKEPRSVAHLTGNPHS |
| | RSIPLEWEDTYGTALISGVKYKKGGLVINETGLYFVYSKVYFRGQSCNNQP |
| | LNHKVYMRNSKYPEDLVLMEEKRLNYCTTGQIWAHSSYLGAVFNLTSADHL |
| | YVNISQLSLINFEESKTFFGLYKL (SEQ ID NO: 184) |
| Human TIM-1 | >NM_012206.3 Homo sapiens hepatitis A virus cellular |
| (CD365) | receptor 1 (HAVCR1), transcript variant 1, mRNA |
| | GACCAGGAGTCAGTTTGGCGGTTATGTGTGGGGAAGAAGCTGGGAAGTCAG |
| | GGGCTGTTTCTGTGGACAGCTTTCCCTGTCCTTTGGAAGGCACAGAGCTCT |
| | CAGCTGCAGGGAACTAACAGAGCTCTGAAGCCGTTATATGTGGTCTTCTCT |
| | CATTTCCAGCAGAGCAGGCTCATATGAATCAACCAACTGGGTGAAAAGATA |
| | AGTTGCAATCTGAGATTTAAGACTTGATCAGATACCATCTGGTGGAGGGTA |
| | CCAACCAGCCTGTCTGCTCATTTTCCTTCAGGCTGATCCCATAATGCATCC |
| | TCAAGTGGTCATCTTAAGCCTCATCCTACATCTGGCAGATTCTGTAGCTGG |
| | TTCTGTAAAGGTTGGTGGAGAGGCAGGTCCATCTGTCACACTACCCTGCCA |
| | CTACAGTGGAGCTGTCACATCCATGTGCTGGAATAGAGGCTCATGTTCTCT |
| | ATTCACATGCCAAAATGGCATTGTCTGGACCAATGGAACCCACGTCACCTA |
| | TCGGAAGGACACACGCTATAAGCTATTGGGGGACCTTTCAAGAAGGGATGT |
| | CTCTTTGACCATAGAAAATACAGCTGTGTCTGACAGTGGCGTATATTGTTG |
| | CCGTGTTGAGCACCGTGGGTGGTTCAATGACATGAAAATCACCGTATCATT |
| | GGAGATTGTGCCACCCAAGGTCACGACTACTCCAATTGTCACAACTGTTCC |
| | AACCGTCACGACTGTTCGAACGAGCACCACTGTTCCAACGACAACGACTGT |
| | TCCAATGACGACTGTTCCAACGACAACTGTTCCAACAACAATGAGCATTCC |
| | AACGACAACGACTGTTCTGACGACAATGACTGTTTCAACGACAACGAGCGT |
| | TCCAACGACAACGAGCATTCCAACAACAACAAGTGTTCCAGTGACAACAAC |
| | TGTCTCTACCTTTGTTCCTCCAATGCCTTTGCCCAGGCAGAACCATGAACC |
| | AGTAGCCACTTCACCATCTTCACCTCAGCCAGCAGAAACCCACCCTACGAC |
| | ACTGCAGGGAGCAATAAGGAGAGAACCCACCAGCTCACCATTGTACTCTTA |
| | CACAACAGATGGGAATGACACCGTGACAGAGTCTTCAGATGGCCTTTGGAA |
| | TAACAATCAAACTCAACTGTTCCTAGAACATAGTCTACTGACGGCCAATAC |
| | CACTAAAGGAATCTATGCTGGAGTCTGTATTTCTGTCTTGGTGCTTCTTGC |
| | TCTTTTGGGTGTCATCATTGCCAAAAAGTATTTCTTCAAAAAGGAGGTTCA |
| | ACAACTAAGTGTTTCATTTAGCAGCCTTCAAATTAAAGCTTTGCAAAATGC |
| | AGTTGAAAAGGAAGTCCAAGCAGAAGACAATATCTACATTGAGAATAGTCT |
| | TTATGCCACGGACTAAGACCCAGTGGTGCTCTTTGAGAGTTTACGCCCATG |
| | AGTGCAGAAGACTGAACAGACATCAGCACATCAGACGTCTTTTAGACCCCA |
| | AGACAATTTTTCTGTTTCAGTTTCATCTGGCATTCCAACATGTCAGTGATA |
| | CTGGGTAGAGTAACTCTCTCACTCCAAACTGTGTATAGTCAACCTCATCAT |
| | TAATGTAGTCCTAATTTTTTATGCTAAAACTGGCTCAATCCTTCTGATCAT |
| | TGCAGTTTTCTCTCAAATATGAACACTTTATAATTGTATGTTCTTTTTAGA |
| | CCCCATAAATCCTGTATACATCAAAGAGAA (SEQ ID NO: 185) |
| | >NP_036338.2 hepatitis A virus cellular receptor 1 |
| | isoform a precursor [Homo sapiens] |
| | MHPQVVILSLILHLADSVAGSVKVGGEAGPSVTLPCHYSGAVTSMCWNRGS |
| | CSLFTCQNGIVWTNGTHVTYRKDTRYKLLGDLSRRDVSLTIENTAVSDSGV |
| | YCCRVEHRGWFNDMKITVSLEIVPPKVTTTPIVTTVPTVTTVRTSTTVPTT |
| | TTVPMTTVPTTTVPTTMSIPTTTTVLTTMTVSTTTSVPTTTSIPTTTSVPV |
| | TTTVSTFVPPMPLPRQNHEPVATSPSSPQPAETHPTTLQGAIRREPTSSPL |
| | YSYTTDGNDTVTESSDGLWNNNQTQLFLEHSLLTANTTKGIYAGVCISVLV |
| | LLALLGVIIAKKYFFKKEVQQLSVSFSSLQIKALQNAVEKEVQAEDNIYIE |
| | NSLYATD (SEQ ID NO: 186) |
| Mouse TIM-1 | >NM_134248.2 Mus musculus hepatitis A virus cellular |
| | receptor 1 (Havcr1), transcript variant 1, mRNA |
| | GTCAGTACCATGAATCAGATTCAAGTCTTCATTTCAGGCCTCATACTGCTT |
| | CTCCCAGGCGCTGTGGATTCTTATGTGGAAGTAAAGGGGGTGGTGGGTCAC |
| | CCTGTCACACTTCCATGTACTTACTCAACATATCGTGGAATCACAACGACA |
| | TGTTGGGGCCGAGGGCAATGCCCATCTTCTGCTTGTCAAAATACACTTATT |
| | TGGACCAATGGACATCGTGTCACCTATCAGAAGAGCAGTCGGTACAACTTA |
| | AAGGGGCATATTTCAGAAGGAGATGTGTCCTTGACGATAGAGAACTCTGTT |
| | GAGAGTGACAGTGGTCTGTATTGTTGTCGAGTGGAGATTCCTGGATGGTTT |
| | AATGATCAGAAAGTGACCTTTTCATTGCAAGTTAAACCAGAGATTCCCACA |
| | CGTCCTCCAAGAAGACCCACAACTACAAGGCCCACAGCTACAGGAAGACCC |
| | ACGACTATTTCAACAAGATCCACACATGTACCAACATCAACCAGAGTCTCT |
| | ACCTCCACTCCTCCAACATCTACACACACATGGACTCACAAACCAGAACCC |
| | ACTACATTTTGTCCCCATGAGACAACAGCTGAGGTGACAGGAATCCCATCC |
| | CATACTCCTACAGACTGGAATGGCACTGTGACATCCTCAGGAGATACCTGG |
| | AGTAATCACACTGAAGCAATCCCTCCAGGGAAGCCGCAGAAAAACCCTACT |
| | AAGGGCTTCTATGTTGGCATCTGCATCGCAGCCCTGCTGCTACTGCTCCTT |
| | GTGAGCACCGTGGCTATCACCAGGTACATACTTATGAAAAGGAAGTCAGCA |
| | TCTCTAAGCGTGGTTGCCTTCCGTGTCTCTAAGATTGAAGCTTTGCAGAAC |
| | GCAGCGGTTGTGCATTCCCGAGCTGAAGACAACATCTACATTGTTGAAGAT |
| | AGACCTTGAGGGGCAGAATGAGTACCAGTGGCCCTCTGAGGGACCTTCTGC |
| | CTGAGATTTATAGAGACTGTCACTGATGTCATAGAGTCACACCCATTACAG |
| | CGCCAAGGCGATTTTCTGTGTTGGTTCTTCCAGCTGCAGCAGAGAGGGTAA |
| | CCCTCTACTGTGTATACTCAAAACTCAGATTAACATCATCCTAATTTTGGT |
| | ATCTGCACCACCTCCGTGTCTCTGCTCACTACAGAGATTCTCTCAAACATG |
| | AACGTTTTAGAAGTTTGTGTTTCCCTTAGTCAATGTAATCATTGGTAATAC |
| | TATTCTATTCTTGGTTACTAAAACCATTACTAAGAGAGGGATAGGAATTAA |
| | AAGTTGGTGTGAGGGGCCTCCTGAATTTAGAAGCACTTGATTCTGTTTTAT |
| | CTACTTTCTTGAAATGTTACTTCTACCCTTCCCAATGGGTAAAATCATGGG |
| | AGCATGGTGCCCTCATAGATAAATAGAAGAGAGTCTATTGCTGCCAATATA |
| | GATGGTTATGCTTTCTCATAGCTCTGAAAATATGACACATTTATTATGAGG |
| | TTGATCTTAGGATAAGGATAGGTGTTTTATGTCAGGAGAGGTTATCATGGT |
| | GAATATGGACCAGCAGACAGCAGTGGAGGAAAATAATGAACCAAGGGATTG |
| | AGTTCATTAGTGCTAATTCTACTCCACTCCTGTCTTTATGCTCCTAAACTT |
| | ACTGACTGAGCTCTGAATTAGGTGCTAGGAGGAGACAATGCAGACATGAAA |
| | GGGGAAGGAGCGCCTTCAGGACACAGGCTCTCTGCTGAGAGAAGTCCTATT |
| | TGCAGGTGTGATAGAGGTTGGGACAATCTCTGAGTTGTAAATTTCTAATTG |
| | TCTTCAGGCCATATTTATAGTTAAATTCATTTCCGAAAGACATAGCATCTT |
| | CCCCAATGGGTCAGTTTGTCAAAATCAATAAAATATTTTGTTTTGCTAAGA |
| | ATTAAAAAAAAAAAAAAAAAAA (SEQ ID NO: 187) |
| | >NP_599009.2 hepatitis A virus cellular receptor 1 |
| | homolog isoform a precursor [Mus musculus] |
| | MNQIQVFISGLILLLPGAVDSYVEVKGVVGHPVTLPCTYSTYRGITTTCWG |
| | RGQCPSSACQNTLIWTNGHRVTYQKSSRYNLKGHISEGDVSLTIENSVESD |
| | SGLYCCRVEIPGWFNDQKVTFSLQVKPEIPTRPPRRPTTTRPTATGRPTTI |
| | STRSTHVPTSTRVSTSTPPTSTHTWTHKPEPTTFCPHETTAEVTGIPSHTP |
| | TDWNGTVTSSGDTWSNHTEAIPPGKPQKNPTKGFYVGTCIAALLLLLLVST |
| | VAITRYILMKRKSASLSVVAFRVSKIEALQNAAVVHSRAEDNIYIVEDRP |
| | (SEQ ID NO: 188) |
| Human PD-1 | >NM_005018.3 Homo sapiens programmed cell death 1 |
| | (PDCD1), mRNA |
| | GCTCACCTCCGCCTGAGCAGTGGAGAAGGCGGCACTCTGGTGGGGCTGCTC |
| | CAGGCATGCAGATCCCACAGGCGCCCTGGCCAGTCGTCTGGGCGGTGCTAC |
| | AACTGGGCTGGCGGCCAGGATGGTTCTTAGACTCCCCAGACAGGCCCTGGA |
| | ACCCCCCCACCTTCTCCCCAGCCCTGCTCGTGGTGACCGAAGGGGACAACG |
| | CCACCTTCACCTGCAGCTTCTCCAACACATCGGAGAGCTTCGTGCTAAACT |
| | GGTACCGCATGAGCCCCAGCAACCAGACGGACAAGCTGGCCGCCTTCCCCG |
| | AGGACCGCAGCCAGCCCGGCCAGGACTGCCGCTTCCGTGTCACACAACTGC |
| | CCAACGGGCGTGACTTCCACATGAGCGTGGTCAGGGCCCGGCGCAATGACA |
| | GCGGCACCTACCTCTGTGGGGCCATCTCCCTGGCCCCCAAGGCGCAGATCA |
| | AAGAGAGCCTGCGGGCAGAGCTCAGGGTGACAGAGAGAAGGGCAGAAGTGC |
| | CCACAGCCCACCCCAGCCCCTCACCCAGGCCAGCCGGCCAGTTCCAAACCC |
| | TGGTGGTTGGTGTCGTGGGCGGCCTGCTGGGCAGCCTGGTGCTGCTAGTCT |
| | GGGTCCTGGCCGTCATCTGCTCCCGGGCCGCACGAGGGACAATAGGAGCCA |
| | GGCGCACCGGCCAGCCCCTGAAGGAGGACCCCTCAGCCGTGCCTGTGTTCT |
| | CTGTGGACTATGGGGAGCTGGATTTCCAGTGGCGAGAGAAGACCCCGGAGC |
| | CCCCCGTGCCCTGTGTCCCTGAGCAGACGGAGTATGCCACCATTGTCTTTC |
| | CTAGCGGAATGGGCACCTCATCCCCCGCCCGCAGGGGCTCAGCTGACGGCC |
| | CTCGGAGTGCCCAGCCACTGAGGCCTGAGGATGGACACTGCTCTTGGCCCC |
| | TCTGACCGGCTTCCTTGGCCACCAGTGTTCTGCAGACCCTCCACCATGAGC |
| | CCGGGTCAGCGCATTTCCTCAGGAGAAGCAGGCAGGGTGCAGGCCATTGCA |
| | GGCCGTCCAGGGGCTGAGCTGCCTGGGGGCGACCGGGGCTCCAGCCTGCAC |
| | CTGCACCAGGCACAGCCCCACCACAGGACTCATGTCTCAATGCCCACAGTG |
| | AGCCCAGGCAGCAGGTGTCACCGTCCCCTACAGGGAGGGCCAGATGCAGTC |
| | ACTGCTTCAGGTCCTGCCAGCACAGAGCTGCCTGCGTCCAGCTCCCTGAAT |
| | CTCTGCTGCTGCTGCTGCTGCTGCTGCTGCTGCCTGCGGCCCGGGGCTGAA |
| | GGCGCCGTGGCCCTGCCTGACGCCCCGGAGCCTCCTGCCTGAACTTGGGGG |
| | CTGGTTGGAGATGGCCTTGGAGCAGCCAAGGTGCCCCTGGCAGTGGCATCC |
| | CGAAACGCCCTGGACGCAGGGCCCAAGACTGGGCACAGGAGTGGGAGGTAC |
| | ATGGGGCTGGGGACTCCCCAGGAGTTATCTGCTCCCTGCAGGCCTAGAGAA |
| | GTTTCAGGGAAGGTCAGAAGAGCTCCTGGCTGTGGTGGGCAGGGCAGGAAA |
| | CCCCTCCACCTTTACACATGCCCAGGCAGCACCTCAGGCCCTTTGTGGGGC |
| | AGGGAAGCTGAGGCAGTAAGCGGGCAGGCAGAGCTGGAGGCCTTTCAGGCC |
| | CAGCCAGCACTCTGGCCTCCTGCCGCCGCATTCCACCCCAGCCCCTCACAC |
| | CACTCGGGAGAGGGACATCCTACGGTCCCAAGGTCAGGAGGGCAGGGCTGG |
| | GGTTGACTCAGGCCCCTCCCAGCTGTGGCCACCTGGGTGTTGGGAGGGCAG |
| | AAGTGCAGGCACCTAGGGCCCCCCATGTGCCCACCCTGGGAGCTCTCCTTG |
| | GAACCCATTCCTGAAATTATTTAAAGGGGTTGGCCGGGCTCCCACCAGGGC |
| | CTGGGTGGGAAGGTACAGGCGTTCCCCCGGGGCCTAGTACCCCCGCCGTGG |
| | CCTATCCACTCCTCACATCCACACACTGCACCCCCACTCCTGGGGCAGGGC |
| | CACCAGCATCCAGGCGGCCAGCAGGCACCTGAGTGGCTGGGACAAGGGATC |
| | CCCCTTCCCTGTGGTTCTATTATATTATAATTATAATTAAATATGAGAGCA |
| | TGCTAA (SEQ ID NO: 189) |
| | >NP_005009.2 programmed cell death protein 1 |
| | precursor [Homo sapiens] |
| | MQIPQAPWPVVWAVLQLGWRPGWFLDSPDRPWNPPTFSPALLVVTEGDNAT |
| | FTCSFSNTSESFVLNWYRMSPSNQTDKLAAFPEDRSQPGQDCRFRVTQLPN |
| | GRDFHMSVVRARRNDSGTYLCGAISLAPKAQIKESLRAELRVTERRAEVPT |
| | AHPSPSPRPAGQFQTLVVGVVGGLLGSLVLLVWVLAVICSRAARGTIGARR |
| | TGQPLKEDPSAVPVFSVDYGELDFQWREKTPEPPVPCVPEQTEYATIVFPS |
| | GMGTSSPARRGSADGPRSAQPLRPEDGHCSWPL (SEQ ID NO: 190) |
| Mouse PD-1 | >NM_008798.3 Mus musculus programmed cell death 1 |
| | (Pdcd1), mRNA |
| | TGAGCAGCGGGGAGGAGGAAGAGGAGACTGCTACTGAAGGCGACACTGCCA |
| | GGGGCTCTGGGCATGTGGGTCCGGCAGGTACCCTGGTCATTCACTTGGGCT |
| | GTGCTGCAGTTGAGCTGGCAATCAGGGTGGCTTCTAGAGGTCCCCAATGGG |
| | CCCTGGAGGTCCCTCACCTTCTACCCAGCCTGGCTCACAGTGTCAGAGGGA |
| | GCAAATGCCACCTTCACCTGCAGCTTGTCCAACTGGTCGGAGGATCTTATG |
| | CTGAACTGGAACCGCCTGAGTCCCAGCAACCAGACTGAAAAACAGGCCGCC |
| | TTCTGTAATGGTTTGAGCCAACCCGTCCAGGATGCCCGCTTCCAGATCATA |
| | CAGCTGCCCAACAGGCATGACTTCCACATGAACATCCTTGACACACGGCGC |
| | AATGACAGTGGCATCTACCTCTGTGGGGCCATCTCCCTGCACCCCAAGGCA |
| | AAAATCGAGGAGAGCCCTGGAGCAGAGCTCGTGGTAACAGAGAGAATCCTG |
| | GAGACCTCAACAAGATATCCCAGCCCCTCGCCCAAACCAGAAGGCCGGTTT |
| | CAAGGCATGGTCATTGGTATCATGAGTGCCCTAGTGGGTATCCCTGTATTG |
| | CTGCTGCTGGCCTGGGCCCTAGCTGTCTTCTGCTCAACAAGTATGTCAGAG |
| | GCCAGAGGAGCTGGAAGCAAGGACGACACTCTGAAGGAGGAGCCTTCAGCA |
| | GCACCTGTCCCTAGTGTGGCCTATGAGGAGCTGGACTTCCAGGGACGAGAG |
| | AAGACACCAGAGCTCCCTACCGCCTGTGTGCACACAGAATATGCCACCATT |
| | GTCTTCACTGAAGGGCTGGGTGCCTCGGCCATGGGACGTAGGGGCTCAGCT |
| | GATGGCCTGCAGGGTCCTCGGCCTCCAAGACATGAGGATGGACATTGTTCT |
| | TGGCCTCTTTGACCAGATTCTTCAGCCATTAGCATGCTGCAGACCCTCCAC |
| | AGAGAGCACCGGTCCGTCCCTCAGTCAAGAGGAGCATGCAGGCTACAGTTC |
| | AGCCAAGGCTCCCAGGGTCTGAGCTAGCTGGAGTGACAGCCCAGCGCCTGC |
| | ACCAATTCCAGCACATGCACTGTTGAGTGAGAGCTCACTTCAGGTTTACCA |
| | CAAGCTGGGAGCAGCAGGCTTCCCGGTTTCCTATTGTCACAAGGTGCAGAG |
| | CTGGGGCCTAAGCCTATGTCTCCTGAATCCTACTGTTGGGCACTTCTAGGG |
| | ACTTGAGACACTATAGCCAATGGCCTCTGTGGGTTCTGTGCCTGGAAATGG |
| | AGAGATCTGAGTACAGCCTGCTTTGAATGGCCCTGTGAGGCAACCCCAAAG |
| | CAAGGGGGTCCAGGTATACTATGGGCCCAGCACCTAAAGCCACCCTTGGGA |
| | GATGATACTCAGGTGGGAAATTCGTAGACTGGGGGACTGAACCAATCCCAA |
| | GATCTGGAAAAGTTTTGATGAAGACTTGAAAAGCTCCTAGCTTCGGGGGTC |
| | TGGGAAGCATGAGCACTTACCAGGCAAAAGCTCCGTGAGCGTATCTGCTGT |
| | CCTTCTGCATGCCCAGGTACCTCAGTTTTTTTCAACAGCAAGGAAACTAGG |
| | GCAATAAAGGGAACCAGCAGAGCTAGAGCCACCCACACATCCAGGGGGGCA |
| | CTTGACTCTCCCTACTCCTCCTAGGAACCAAAAGGACAAAGTCCATGTTGA |
| | CAGCAGGGAAGGAAAGGGGGATATAACCTTGACGCAAACCAACACTGGGGT |
| | GTTAGAATCTCCTCATTCACTCTGTCCTGGAGTTGGGTTCTGGCTCTCCTT |
| | CACACCTAGGACTCTGAAATGAGCAAGCACTTCAGACAGTCAGGGTAGCAA |
| | GAGTCTAGCTGTCTGGTGGGCACCCAAAATGACCAGGGCTTAAGTCCCTTT |
| | CCTTTGGTTTAAGCCCGTTATAATTAAATGGTACCAAAAGCTTTAA (SEQ |
| | ID NO: 191) |
| | >NP_032824.1 programmed cell death protein 1 |
| | precursor [Mus musculus] |
| | MWVRQVPWSFTWAVLQLSWQSGWLLEVPNGPWRSLTFYPAWLTVSEGANAT |
| | FTCSLSNWSEDLMLNWNRLSPSNQTEKQAAFCNGLSQPVQDARFQIIQLPN |
| | RHDFHMNILDTRRNDSGIYLCGAISLHPKAKIEESPGAELVVTERILETST |
| | RYPSPSPKPEGRFQGMVIGIMSALVGIPVLLLLAWALAVFCSTSMSEARGA |
| | GSKDDTLKEEPSAAPVPSVAYEELDFQGREKTPELPTACVHTEYATIVFTE |
| | GLGASAMGRRGSADGLQGPRPPRHEDGHCSWPL (SEQ ID NO: 191) |
| mScarlet | >KY021423.1 Synthetic construct mScarlet gene, |
| | partial cds, mRNA |
| | ATGGTGAGCAAGGGCGAGGCAGTGATCAAGGAGTTCATGCGGTTCAAGGTG |
| | CACATGGAGGGCTCCATGAACGGCCACGAGTTCGAGATCGAGGGCGAGGGC |
| | GAGGGCCGCCCCTACGAGGGCACCCAGACCGCCAAGCTGAAGGTGACCAAG |
| | GGTGGCCCCCTGCCCTTCTCCTGGGACATCCTGTCCCCTCAGTTCATGTAC |
| | GGCTCCAGGGCCTTCACCAAGCACCCCGCCGACATCCCCGACTACTATAAG |
| | CAGTCCTTCCCCGAGGGCTTCAAGTGGGAGCGCGTGATGAACTTCGAGGAC |
| | GGCGGCGCCGTGACCGTGACCCAGGACACCTCCCTGGAGGACGGCACCCTG |
| | ATCTACAAGGTGAAGCTCCGCGGCACCAACTTCCCTCCTGACGGCCCCGTA |
| | ATGCAGAAGAAGACAATGGGCTGGGAAGCGTCCACCGAGCGGTTGTACCCC |
| | GAGGACGGCGTGCTGAAGGGCGACATTAAGATGGCCCTGCGCCTGAAGGAC |
| | GGCGGCCGCTACCTGGCGGACTTCAAGACCACCTACAAGGCCAAGAAGCCC |
| | GTGCAGATGCCCGGCGCCTACAACGTCGACCGCAAGTTGGACATCACCTCC |
| | CACAACGAGGACTACACCGTGGTGGAACAGTACGAACGCTCCGAGGGCCGC |
| | CACTCCACCGGCGGCATGGACGAGCTGTACAAG (SEQ ID NO: 192) |
| | >APD76535.1 mScarlet, partial [synthetic construct] |
| | MVSKGEAVIKEFMRFKVHMEGSMNGHEFEIEGEGEGRPYEGTQTAKLKVTK |
| | GGPLPFSWDILSPQFMYGSRAFTKHPADIPDYYKQSFPEGFKWERVMNFED |
| | GGAVTVTQDTSLEDGTLIYKVKLRGTNFPPDGPVMQKKTMGWEASTERLYP |
| | EDGVLKGDIKMALRLKDGGRYLADFKTTYKAKKPVQMPGAYNVDRKLDITS |
| | HNEDYTVVEQYERSEGRHSTGGMDELYK (SEQ ID NO: 193) |
| Nanoluciferase | >JQ513379.1 NanoLuc reporter vector |
| | pNL1.1.CMV[Nluc/CMV], complete sequence, mRNA |
| | GGCCTAACTGGCCTCAATATTGGCCATTAGCCATATTATTCATTGGTTATA |
| | TAGCATAAATCAATATTGGCTATTGGCCATTGCATACGTTGTATCTATATC |
| | ATAATATGTACATTTATATTGGCTCATGTCCAATATGACCGCCATGTTGGC |
| | ATTGATTATTGACTAGTTATTAATAGTAATCAATTACGGGGTCATTAGTTC |
| | ATAGCCCATATATGGAGTTCCGCGTTACATAACTTACGGTAAATGGCCCGC |
| | CTGGCTGACCGCCCAACGACCCCCGCCCATTGACGTCAATAATGACGTATG |
| | TTCCCATAGTAACGCCAATAGGGACTTTCCATTGACGTCAATGGGTGGAGT |
| | ATTTACGGTAAACTGCCCACTTGGCAGTACATCAAGTGTATCATATGCCAA |
| | GTCCGCCCCCTATTGACGTCAATGACGGTAAATGGCCCGCCTGGCATTATG |
| | CCCAGTACATGACCTTACGGGACTTTCCTACTTGGCAGTACATCTACGTAT |
| | TAGTCATCGCTATTACCATGGTGATGCGGTTTTGGCAGTACACCAATGGGC |
| | GTGGATAGCGGTTTGACTCACGGGGATTTCCAAGTCTCCACCCCATTGACG |
| | TCAATGGGAGTTTGTTTTGGCACCAAAATCAACGGGACTTTCCAAAATGTC |
| | GTAATAACCCCGCCCCGTTGACGCAAATGGGCGGTAGGCGTGTACGGTGGG |
| | AGGTCTATATAAGCAGAGCTCGTTTAGTGAACCGTCAGATCACTAGAAGCT |
| | TTATTGCGGTAGTTTATCACAGTTAAATTGCTAACGCAGTCAGTGGGCCTC |
| | GGCGGCCAAGCTTGGCAATCCGGTACTGTTGGTAAAGCCACCATGGTCTTC |
| | ACACTCGAAGATTTCGTTGGGGACTGGCGACAGACAGCCGGCTACAACCTG |
| | GACCAAGTCCTTGAACAGGGAGGTGTGTCCAGTTTGTTTCAGAATCTCGGG |
| | GTGTCCGTAACTCCGATCCAAAGGATTGTCCTGAGCGGTGAAAATGGGCTG |
| | AAGATCGACATCCATGTCATCATCCCGTATGAAGGTCTGAGCGGCGACCAA |
| | ATGGGCCAGATCGAAAAAATTTTTAAGGTGGTGTACCCTGTGGATGATCAT |
| | CACTTTAAGGTGATCCTGCACTATGGCACACTGGTAATCGACGGGGTTACG |
| | CCGAACATGATCGACTATTTCGGACGGCCGTATGAAGGCATCGCCGTGTTC |
| | GACGGCAAAAAGATCACTGTAACAGGGACCCTGTGGAACGGCAACAAAATT |
| | ATCGACGAGCGCCTGATCAACCCCGACGGCTCCCTGCTGTTCCGAGTAACC |
| | ATCAACGGAGTGACCGGCTGGCGGCTGTGCGAACGCATTCTGGCGTAATTC |
| | TAGAGTCGGGGCGGCCGGCCGCTTCGAGCAGACATGATAAGATACATTGAT |
| | GAGTTTGGACAAACCACAACTAGAATGCAGTGAAAAAAATGCTTTATTTGT |
| | GAAATTTGTGATGCTATTGCTTTATTTGTAACCATTATAAGCTGCAATAAA |
| | CAAGTTAACAACAACAATTGCATTCATTTTATGTTTCAGGTTCAGGGGGAG |
| | GTGTGGGAGGTTTTTTAAAGCAAGTAAAACCTCTACAAATGTGGTAAAATC |
| | GATAAGGATCCGTCGACCGATGCCCTTGAGAGCCTTCAACCCAGTCAGCTC |
| | CTTCCGGTGGGCGCGGGGCATGACTATCGTCGCCGCACTTATGACTGTCTT |
| | CTTTATCATGCAACTCGTAGGACAGGTGCCGGCAGCGCTCTTCCGCTTCCT |
| | CGCTCACTGACTCGCTGCGCTCGGTCGTTCGGCTGCGGCGAGCGGTATCAG |
| | CTCACTCAAAGGCGGTAATACGGTTATCCACAGAATCAGGGGATAACGCAG |
| | GAAAGAACATGTGAGCAAAAGGCCAGCAAAAGGCCAGGAACCGTAAAAAGG |
| | CCGCGTTGCTGGCGTTTTTCCATAGGCTCCGCCCCCCTGACGAGCATCACA |
| | AAAATCGACGCTCAAGTCAGAGGTGGCGAAACCCGACAGGACTATAAAGAT |
| | ACCAGGCGTTTCCCCCTGGAAGCTCCCTCGTGCGCTCTCCTGTTCCGACCC |
| | TGCCGCTTACCGGATACCTGTCCGCCTTTCTCCCTTCGGGAAGCGTGGCGC |
| | TTTCTCATAGCTCACGCTGTAGGTATCTCAGTTCGGTGTAGGTCGTTCGCT |
| | CCAAGCTGGGCTGTGTGCACGAACCCCCCGTTCAGCCCGACCGCTGCGCCT |
| | TATCCGGTAACTATCGTCTTGAGTCCAACCCGGTAAGACACGACTTATCGC |
| | CACTGGCAGCAGCCACTGGTAACAGGATTAGCAGAGCGAGGTATGTAGGCG |
| | GTGCTACAGAGTTCTTGAAGTGGTGGCCTAACTACGGCTACACTAGAAGAA |
| | CAGTATTTGGTATCTGCGCTCTGCTGAAGCCAGTTACCTTCGGAAAAAGAG |
| | TTGGTAGCTCTTGATCCGGCAAACAAACCACCGCTGGTAGCGGTGGTTTTT |
| | TTGTTTGCAAGCAGCAGATTACGCGCAGAAAAAAAGGATCTCAAGAAGATC |
| | CTTTGATCTTTTCTACGGGGTCTGACGCTCAGTGGAACGAAAACTCACGTT |
| | AAGGGATTTTGGTCATGAGATTATCAAAAAGGATCTTCACCTAGATCCTTT |
| | TAAATTAAAAATGAAGTTTTAAATCAATCTAAAGTATATATGAGTAAACTT |
| | GGTCTGACAGCGGCCGCAAATGCTAAACCACTGCAGTGGTTACCAGTGCTT |
| | GATCAGTGAGGCACCGATCTCAGCGATCTGCCTATTTCGTTCGTCCATAGT |
| | GGCCTGACTCCCCGTCGTGTAGATCACTACGATTCGTGAGGGCTTACCATC |
| | AGGCCCCAGCGCAGCAATGATGCCGCGAGAGCCGCGTTCACCGGCCCCCGA |
| | TTTGTCAGCAATGAACCAGCCAGCAGGGAGGGCCGAGCGAAGAAGTGGTCC |
| | TGCTACTTTGTCCGCCTCCATCCAGTCTATGAGCTGCTGTCGTGATGCTAG |
| | AGTAAGAAGTTCGCCAGTGAGTAGTTTCCGAAGAGTTGTGGCCATTGCTAC |
| | TGGCATCGTGGTATCACGCTCGTCGTTCGGTATGGCTTCGTTCAACTCTGG |
| | TTCCCAGCGGTCAAGCCGGGTCACATGATCACCCATATTATGAAGAAATGC |
| | AGTCAGCTCCTTAGGGCCTCCGATCGTTGTCAGAAGTAAGTTGGCCGCGGT |
| | GTTGTCGCTCATGGTAATGGCAGCACTACACAATTCTCTTACCGTCATGCC |
| | ATCCGTAAGATGCTTTTCCGTGACCGGCGAGTACTCAACCAAGTCGTTTTG |
| | TGAGTAGTGTATACGGCGACCAAGCTGCTCTTGCCCGGCGTCTATACGGGA |
| | CAACACCGCGCCACATAGCAGTACTTTGAAAGTGCTCATCATCGGGAATCG |
| | TTCTTCGGGGCGGAAAGACTCAAGGATCTTGCCGCTATTGAGATCCAGTTC |
| | GATATAGCCCACTCTTGCACCCAGTTGATCTTCAGCATCTTTTACTTTCAC |
| | CAGCGTTTCGGGGTGTGCAAAAACAGGCAAGCAAAATGCCGCAAAGAAGGG |
| | AATGAGTGCGACACGAAAATGTTGGATGCTCATACTCGTCCTTTTTCAATA |
| | TTATTGAAGCATTTATCAGGGTTACTAGTACGTCTCTCAAGGATAAGTAAG |
| | TAATATTAAGGTACGGGAGGTATTGGACAGGCCGCAATAAAATATCTTTAT |
| | TTTCATTACATCTGTGTGTTGGTTTTTTGTGTGAATCGATAGTACTAACAT |
| | ACGCTCTCCATCAAAACAAAACGAAACAAAACAAACTAGCAAAATAGGCTG |
| | TCCCCAGTGCAAGTGCAGGTGCCAGAACATTTCTCT (SEQ ID NO: 194) |
| | >AFJ15599.1 NanoLuc luciferase [NanoLuc reporter |
| | vector pNL1.1.CMV[Nluc/CMV]] |
| | MVFTLEDFVGDWRQTAGYNLDQVLEQGGVSSLFQNLGVSVTPIQRIVLSGE |
| | NGLKIDIHVIIPYEGLSGDQMGQIEKIFKVVYPVDDHHFKVILHYGTLVID |
| | GVTPNMIDYFGRPYEGIAVFDGKKITVTGTLWNGNKIIDERLINPDGSLLF |
| | RVTINGVTGWRLCERILA (SEQ ID NO: 195) |

[0114] The polypeptides provided in Table 1 above are involved in a range of biological processes, including but not limited to, suppressing the adaptive arm of the immune system (e.g., PD-L1); cellular adhesion (e.g., nectin), immune activation (e.g., HVEM), and the like. The POI domains can also be used to track, purify, or identify the engineered EVs from native EVs (e.g., mScarlet and nanoluciferase). The genes, transcripts, polypeptides, variants, and fragments thereof can be used in any combination from Table 1 to be expressed by an engineered EV provided herein. In some embodiments, the POI domain is the human polypeptide. In some embodiments, the POI domain is a homologue of the human polypeptide (e.g., mouse).

[0115] In some embodiments of any of the aspects, the engineered cell or EV provided herein comprises an exogenous nucleic acid encoding one or more exogenous polypeptide(s) selected from the group consisting of: the polypeptides listed in Table 1.

[0116] In some embodiments of any of the aspects, the POI domain is PD-L1 or a fragment thereof. In some embodiments of any of the aspects, the POI domain is PD-L2 or a fragment thereof. In some embodiments of any of the aspects, the POI domain is FGL1 or a fragment thereof. In some embodiments of any of the aspects, the POI domain is 4-1BBL or a fragment thereof. In some embodiments of any of the aspects, the POI domain is CTLA or a fragment thereof.

[0117] In some embodiments of any of the aspects, the POI domain substantially binds to one or more of a target polypeptide. In some embodiments of any of the aspects, the target polypeptide is a cellular receptor. In some embodiments of any of the aspects, the target polypeptide is an immunosuppressive polypeptide. In some embodiments of any of the aspects, the target polypeptide is an immunostimulatory polypeptide. The engineered exosomes provided herein can be designed to activate, block, or modulate a given target polypeptide with the appropriate POI domain that binds to or modulates the function or expression of the target polypeptide. Non-limiting examples of target polypeptides include those listed in Table 2 (below).

TABLE 2
Exemplary Target Polypeptides

| | | | |
|---|---|---|---|
| PD-1 | VISTA | LAG-3 | CD44 |
| CD80 | BTLA | CD112 | IL10RA |
| CD86 | CD160 | CD200R | IL10RB |
| CD28 | HVEM | CD200 | Tim-3 |
| ICOS | CD2 | Galectin 9 | TNFRSF25 |
| CD28H | SLAM CD150 | TIM-3 | TNFRSF6B |
| PD-L1 | CD58 | CD226 | CD113 |
| CTLA-4 | TIM-1 | CD155 | CD27 |
| 4-1BB (CD137) | TIM-4 | CD112 | CD30 |
| GITR | CD40 | DR3 | LFA-3 (CD58) |
| CD27L | CD30L | GITRL | CD40L |
| CD48 | CD244 | DcR3 | CD28H |
| LFA-3 (CD58) | CD98 | TNF Receptor | TNF receptor |
| | | Superfamily | associated factor |
| | | members | (TRAF) family |
| | | | members |
| Butyrophilin | PD-L2 | Nectin | TIM family |
| family members | | | members |
| B7/CD28 family | SLAM family | Nectin-like binding | Collagen family |
| members | members | receptors | proteins |
| LAIR-1 (CD305) | | | |

[0118] The EVs provided herein further comprise at least one fusion protein comprising a vesicle targeting domain. In various embodiments, the vesicle targeting domain provided herein is capable of binding or anchoring the fusion polypeptide provided herein to an extracellular vesicle, e.g., via targeting of the phospholipid bilayer membrane. In various embodiments, the vesicle targeting domain is a GPI domain (i.e., GPI linker, GPI anchor), fatty acetylation site, or prenylation site. One of skill in the art can appreciate that the aforementioned refer to peptide or protein sites, wherein covalent lipid attachment supports embedding of the lipid in a cell membrane (i.e., phospholipid bilayer). Biochemical forces that anchor EV targeting domains to the EV phospholipid bilayer may include, but are not limited to, electrostatic forces, affinity for EVs through protein-protein interactions with natively resident proteins (e.g., CD81, CD63, CD9, ALIX, TSG101. CD98, CD298, MARCKS, PTGFRN, Lactadherin (MFGe8)), association or affinity for negatively or positively curved phospholipids, association or affinity for negatively or positively charged domains of resident membrane associated proteins, etc., or the like.

[0119] Additional non-limiting examples of membrane targeting domains that can be used and their properties are further described in detail, e.g., Alberts B, Johnson A, Lewis J, et al., Molecular Biology of the Cell, 4th edition, New York: Garland Science, 2002. Membrane Proteins, https://www.ncbi.nlm.nih.gov/books/NBK26878/; Marilyn D. Resh, Fatty acylation of proteins: new insights into membrane targeting of myristoylated and palmitoylated proteins. Biochimica et Biophysica Acta (BBA)—Molecular Cell Research. Volume 1451, Issue 1, 12 Aug. 1999, Pages 1-16, doi.org/10.1016/S0167-4889(99)00075-0; Ann Apolloni, et. al., H-ras but Not K-ras Traffics to the Plasma Membrane through the Exocytic Pathway, Molecular and Cellular Biology April 2000, 20 (7) 2475-2487, DOI: 10.1128/MCB.20.7.2475-2487.2000; Rosie Dawaliby et. al., Phosphatidylethanolamine Is a Key Regulator of Membrane Fluidity in Eukaryotic Cells, Membrane Biology, VOLUME 291, ISSUE 7, doi.org/10.1074/jbc.M115.706523; R J. Deschenes, Protein Palmitoylation, Encyclopedia of Biological Chemistry (Second Edition), Academic Press, 2013, Pages 645-647, ISBN 9780123786319, https://doi.org/10.1016/B978-0-12-378630-2.00022-0.; Charuta C. Palsuledesai and Mark D. Distefano, Protein Prenylation: Enzymes, Therapeutics, and Biotechnology Applications, ACS Chemical Biology 2015 10 (1), 51-62, DOI: 10.1021/cb500791f; Hung M E, Leonard J N. Stabilization of exosome-targeting peptides via engineered glycosylation, J Biol Chem, 2015 Mar. 27; 290(13):8166-72, doi: 10.1074/jbc.M114.621383; Udenwobele Daniel Ikenna, et. al., Myristoylation: An Important Protein Modification in the Immune Response, Frontiers in Immunology, Vol:8, 2017, DOI=10.3389/fimmu.2017.00751; Kinoshita Taroh 2020Biosynthesis and biology of mammalian GPI-anchored proteins Open Biol. 10190290, http://doi.org/10.1098/rsob.190290, the contents of which are incorporated herein by reference in their entireties.

[0120] In some embodiments, the fusion polypeptide comprises one or more, two or more, three or more, four or more, five or more, or six or more vesicle targeting domains on the same polypeptide or nucleic acid construct encoding said polypeptide. For example, the fusion polypeptides provided herein can comprise PD-L1 and Glycosylphosphatidylinositol (GPI).

[0121] In some embodiments, the vesicle targeting domain is a prenylated protein. Prenylated proteins are proteins that have at least one prenylation site. Prenylation occurs when a 15-carbon or 20-carbon, farnesyl or geranylgeranyl isoprenoid, respectively, is covalently bound via a thioether bond to a cysteine at or near the carboxy terminus of a protein. In general, a prenylation site comprises an amino acid sequence CAAX, wherein C represents cysteine, A represents an aliphatic amino acid (glycine, alanine, valine, leucine, or isoleucine), and X represents alanine, methionine, serine, leucine, or glutamine.

[0122] In some embodiments, the vesicle targeting domain is a fatty acylated protein. Fatty acylated proteins are proteins that have been modified post-translationally by covalent attachment of one or more fatty acids, generally with a saturated fatty acid that comprises 14-carbon (e.g. myristic acid) via myristoylation or 16-carbons (e.g. palmitic acid) via palmitoylation. For example, proteins destined to become myristoylated begin with the amino acids Met-Gly-X-X-X followed by a serine or threonine at position 6 and lysine or arginine at position 7 and/or 8 wherein X can be any amino acid. The methionine is removed and a myristate is linked to the glycine via an amide bond. Palmitoylation herein means a posttranslational covalent attachment of fatty acids (e.g. palmitic acid) to cysteine (S-palmitoylation), serine and/or threonine (0-palmitoylation), and to the amino group of lysine (N-palmitoylation) of proteins.

[0123] Palmitoylated proteins may be acylated by attachment of a thioester linkage to a sulfhydryl group of cysteine, or via a palmitate linked to the amino group of an N-terminal cysteine. Palmitoylation sites may be present near the N- or C-terminus of a protein.

[0124] In some embodiments, the vesicle targeting domain is a glycosylphosphatidylinositol (GPI) anchor. A glycosylphosphatidylinositol (GPI) anchor (“GPI anchor”) or “GPI sticky binder” are used interchangeably and refer to a means of stably anchoring a protein to an outer leaflet (e.g. exterior layer of a phospholipid bilayer) of a cell membrane. A GPI anchor comprises a glycan, a phosphoethanolamine linker, a phospholipid tail, and may be modified by various glycan sidechains. The glycan core comprises phosphoinositol, glucosamine, and mannose residues wherein said mannose residues may be modified for example with phosphoethanolamine or carbohydrates. The phosphoethanolamine is amide-bonded to the carboxyl terminus of a protein during the process of GPI attachment. In some embodiments, the vesicle targeting domain may have affinity to EV resident proteins, e.g., CD81, CD63, CD9, ALIX, TSG101, CD98, CD298, MARCKS, PTGFRN, Lactadherin (MFGe8)

[0125] Sticky binders can include a sequence for one or more myristoylation and/or palmitoylation (Myr/Palm) sites fused to a transmembrane domain from 4F2 (CD98). For example, the myristoylation sequence from the MARCKS protein may be modified to encode for one or more myristoylation and palmitoylation sites, wherein the modified MARCKS protein sequence is fused to a protein sequence of the transmembrane domain from 4F2 via a covalent peptide bond. A Myr/Palm followed by the 4F2 transmembrane domain can improve loading of the fusion proteins provided herein when compared with 4F2 transmembrane domain alone or Myr/Palm alone.

[0126] Non-limiting examples of vesicle targeting domains that enhance fusion polypeptide structure and function on the extracellular vesicles are provided in Table 3 (below).

TABLE 3
Exosome Targeting Domain

| Exosome Targeting | |
|---|---|
| Domain/Sticky | Nucleic Acid Sequence (SEQ ID NO:) |
| Binder | Amino Acid Sequence (SEQ ID NO:) |
| Human CD55 | >NM_000574.5 Homo sapiens CD55 molecule (Cromer blood |
| (DAF) | group) (CD55), transcript variant 1, mRNA |
| Glycosyl- | CTGCTTACTGCAACTCGCTCCGGCCGCTGGGCGTAGCTGCGACTCGGCGGAGTCCCG |
| phosphatidylinositol | GCGGCGCGTCCTTGTTCTAACCCGGCGCGCCATGACCGTCGCGCGGCCGAGCGTGCC |
| (GPT) | CGCGGCGCTGCCCCTCCTCGGGGAGCTGCCCCGGCTGCTGCTGCTGGTGCTGTTGTG |
| | CCTGCCGGCCGTGTGGGGTGACTGTGGCCTTCCCCCAGATGTACCTAATGCCCAGCC |
| | AGCTTTGGAAGGCCGTACAAGTTTTCCCGAGGATACTGTAATAACGTACAAATGTGA |
| | AGAAAGCTTTGTGAAAATTCCTGGCGAGAAGGACTCAGTGATCTGCCTTAAGGGCAG |
| | TCAATGGTCAGATATTGAAGAGTTCTGCAATCGTAGCTGCGAGGTGCCAACAAGGCT |
| | AAATTCTGCATCCCTCAAACAGCCTTATATCACTCAGAATTATTTTCCAGTCGGTAC |
| | TGTTGTGGAATATGAGTGCCGTCCAGGTTACAGAAGAGAACCTTCTCTATCACCAAA |
| | ACTAACTTGCCTTCAGAATTTAAAATGGTCCACAGCAGTCGAATTTTGTAAAAAGAA |
| | ATCATGCCCTAATCCGGGAGAAATACGAAATGGTCAGATTGATGTACCAGGTGGCAT |
| | ATTATTTGGTGCAACCATCTCCTTCTCATGTAACACAGGGTACAAATTATTTGGCTC |
| | GACTTCTAGTTTTTGTCTTATTTCAGGCAGCTCTGTCCAGTGGAGTGACCCGTTGCC |
| | AGAGTGCAGAGAAATTTATTGTCCAGCACCACCACAAATTGACAATGGAATAATTCA |
| | AGGGGAACGTGACCATTATGGATATAGACAGTCTGTAACGTATGCATGTAATAAAGG |
| | ATTCACCATGATTGGAGAGCACTCTATTTATTGTACTGTGAATAATGATGAAGGAGA |
| | GTGGAGTGGCCCACCACCTGAATGCAGAGGAAAATCTCTAACTTCCAAGGTCCCACC |
| | AACAGTTCAGAAACCTACCACAGTAAATGTTCCAACTACAGAAGTCTCACCAACTTC |
| | TCAGAAAACCACCACAAAAACCACCACACCAAATGCTCAAGCAACACGGAGTACACC |
| | TGTTTCCAGGACAACCAAGCATTTTCATGAAACAACCCCAAATAAAGGAAGTGGAAC |
| | CACTTCAGGTACTACCCGTCTTCTATCTGGGCACACGTGTTTCACGTTGACAGGTTT |
| | GCTTGGGACGCTAGTAACCATGGGCTTGCTGACTTAGCCAAAGAAGAGTTAAGAAGA |
| | AAATACACACAAGTATACAGACTGTTCCTAGTTTCTTAGACTTATCTGCATATTGGA |
| | TAAAATAAATGCAATTGTGCTCTTCATTTAGGATGCTTTCATTGTCTTTAAGATGTG |
| | TTAGGAATGTCAACAGAGCAAGGAGAAAAAAGGCAGTCCTGGAATCACATTCTTAGC |
| | ACACCTACACCTCTTGAAAATAGAACAACTTGCAGAATTGAGAGTGATTCCTTTCCT |
| | AAAAGTGTAAGAAAGCATAGAGATTTGTTCGTATTTAGAATGGGATCACGAGGAAAA |
| | GAGAAGGAAAGTGATTTTTTTCCACAAGATCTGTAATGTTATTTCCACTTATAAAGG |
| | AAATAAAAAATGAAAAACATTATTTGGATATCAAAAGCAAATAAAAACCCAATTCAG |
| | TCTCTTCTAAGCAAAATTGCTAAAGAGAGATGAACCACATTATAAAGTAATCTTTGG |
| | CTGTAAGGCATTTTCATCTTTCCTTCGGGTTGGCAAAATATTTTAAAGGTAAAACAT |
| | GCTGGTGAACCAGGGGTGTTGATGGTGATAAGGGAGGAATATAGAATGAAAGACTGA |
| | ATCTTCCTTTGTTGCACAAATAGAGTTTGGAAAAAGCCTGTGAAAGGTGTCTTCTTT |
| | GACTTAATGTCTTTAAAAGTATCCAGAGATACTACAATATTAACATAAGAAAAGATT |
| | ATATATTATTTCTGAATCGAGATGTCCATAGTCAAATTTGTAAATCTTATTCTTTTG |
| | TAATATTTATTTATATTTATTTATGACAGTGAACATTCTGATTTTACATGTAAAACA |
| | AGAAAAGTTGAAGAAGATATGTGAAGAAAAATGTATTTTTCCTAAATAGAAATAAAT |
| | GATCCCATTTTTTGGTATCATGTAGTATGTGAAATTTATTCTTAAACGTGACTACTT |
| | TATTTCTAAATAAGAAATTCCCTACCTGCTTCCTACAAGCAGTTCAGAATGCCATGC |
| | CTTGGTTGTCCTAGTGTGAATAATTTTCAGCTACTTTAAAATTATATTGTACTTTCT |
| | CAAGCATGTCATATCCTTTCCTATTAGAGTATCTATATTACTTGTTACTGATTTACC |
| | TGAAGGCAATCTGATTAATTTCTAGGTTTTTACCATATTCTTGTCATCTTGCCAATT |
| | ACATTTTAAGTGTTAGACTAGACTAAGATGTACTAGTTGTATAGAATATAACTAGA |
| | TTTATTATGGCAATGTTTATTTTGTCATTTTGCTTCATCTGTTTTGTTGTTGAAGTA |
| | CTTTAAATTTCATACGTTCATGGCATTTCACTGTAAAGACTTTAATGTGTATTTCTT |
| | AAAATAAAACTTTTTTTCCTCCTTAA (SEQ ID NO: 196) |
| | >NP_000565.1 complement decay-accelerating factor isoform |
| | 1 preproprotein sapiens |
| | MTVARPSVPAALPLLGELPRLLLLVLLCLPAVWGDCGLPPDVPNAQPALEGRTSFPE |
| | DTVITYKCEESFVKIPGEKDSVICLKGSQWSDIEEFCNRSCEVPTRLNSASLKQPYI |
| | TQNYFPVGTVVEYECRPGYRREPSLSPKLTCLQNLKWSTAVEFCKKKSCPNPGEIRN |
| | GQIDVPGGILFGATISFSCNTGYKLFGSTSSFCLISGSSVQWSDPLPECREIYCPAP |
| | PQIDNGIIQGERDHYGYRQSVTYACNKGFTMIGEHSTYCTVNNDEGEWSGPPPECRG |
| | KSLTSKVPPTVQKPTTVNVPTTEVSPTSQKTTTKTTTPNAQATRSTPVSRTTKHFHE |
| | TTPNKGSGTTSGTTRLLSGHTCFTLIGLLGTINTMGLLT (SEQ ID NO: 197) |
| Human CD59 | >NM_203330.2 Homo sapiens CD59 molecule (CD59 blood |
| Glycosyl- | group) (CD59), transcript variant 1, mRNA |
| phosphatidylinositol | GGGGCCGGGGGGCGGAGCCTTGCGGGCTGGAGCGAAAGAATGCGGGGGCTGA |
| (GPI) | GCGCAGAAGCGGCTCGAGGCTGGAAGAGGATCTTGGGCGCCGCCAGTCTCTC |
| | TCTGTTGCCCAAGCTGGAGTGCAGTGGCACAGTCTTGGCTCACTGCAACCTC |
| | CACCTCCTGGGTGCAAGCGATTCTCGTGTCTCAGCCTCTCAAGTAGCTGGGA |
| | TTACAGTCTTTAGCACCAGTTGGTGTAGGAGTTGAGACCTACTTCACAGTAG |
| | TTCTGTGGACAATCACAATGGGAATCCAAGGAGGGTCTGTCCTGTTCGGGCT |
| | GCTGCTCGTCCTGGCTGTCTTCTGCCATTCAGGTCATAGCCTGCAGTGCTAC |
| | AACTGTCCTAACCCAACTGCTGACTGCAAAACAGCCGTCAATTGTTCATCTG |
| | ATTTTGATGCGTGTCTCATTACCAAAGCTGGGTTACAAGTGTATAACAAGTG |
| | TTGGAAGTTTGAGCATTGCAATTTCAACGACGTCACAACCCGCTTGAGGGAA |
| | AATGAGCTAACGTACTACTGCTGCAAGAAGGACCTGTGTAACTTTAACGAAC |
| | AGCTTGAAAATGGTGGGACATCCTTATCAGAGAAAACAGTTCTTCTGCTGGT |
| | GACTCCATTTCTGGCAGCAGCCTGGAGCCTTCATCCCTAAGTCAACACCAGG |
| | AGAGCTTCTCCCAAACTCCCCGTTCCTGCGTAGTCCGCTTTCTCTTGCTGCC |
| | ACATTCTAAAGGCTTGATATTTTCCAAATGGATCCTGTTGGGAAAGAATAAA |
| | ATTAGCTTGAGCAACCTGGCTAAGATAGAGGGGCTCTGGGAGACTTTGAAGA |
| | CCAGTCCTGTTTGCAGGGAAGCCCCACTTGAAGGAAGAAGTCTAAGAGTGAA |
| | GTAGGTGTGACTTGAACTAGATTGCATGCTTCCTCCTTTGCTCTTGGGAAGA |
| | CCAGCTTTGCAGTGACAGCTTGAGTGGGTTCTCTGCAGCCCTCAGATTATTT |
| | TTCCTCTGGCTCCTTGGATGTAGTCAGTTAGCATCATTAGTACATCTTTGGA |
| | GGGTGGGGCAGGAGTATATGAGCATCCTCTCTCACATGGAACGCTTTCATAA |
| | ACTTCAGGGATCCCGTGTTGCCATGGAGGCATGCCAAATGTTCCATATGTGG |
| | GTGTCAGTCAGGGACAACAAGATCCTTAATGCAGAGCTAGAGGACTTCTGGC |
| | AGGGAAGTGGGGAAGTGTTCCAGATAGCAGGGCATGAAAACTTAGAGAGGTA |
| | CAAGTGGCTGAAAATCGAGTTTTTCCTCTGTCTTTAAATTTTATATGGGCTT |
| | TGTTATCTTCCACTGGAAAAGTGTAATAGCATACATCAATGGTGTGTTAAAG |
| | CTATTTCCTTGCCTTTTTTTTATTGGAATGGTAGGATATCTTGGCTTTGCCA |
| | CACACAGTTACAGAGTGAACACTCTACTACATGTGACTGGCAGTATTAAGTG |
| | TGCTTATTTTAAATGTTACTGGTAGAAAGGCAGTTCAGGTATGTGTGTATAT |
| | AGTATGAATGCAGTGGGGACACCCTTTGTGGTTACAGTTTGAGACTTCCAAA |
| | GGTCATCCTTAATAACAACAGATCTGCAGGGGTATGTTTTACCATCTGCATC |
| | CAGCCTCCTGCTAACTCCTAGCTGACTCAGCATAGATTGTATAAAATACCTT |
| | TGTAACGGCTCTTAGCACACTCACAGATGTTTGAGGCTTTCAGAAGCTCTTC |
| | TAAAAAATGATACACACCTTTCACAAGGGCAAACTTTTTCCTTTTCCCTGTG |
| | TATTCTAGTGAATGAATCTCAAGATTCAGTAGACCTAATGACATTTGTATTT |
| | TATGATCTTGGCTGTATTTAATGGCATAGGCTGACTTTTGCAGATGGAGGAA |
| | TTTCTTGATTAATGTTGAAAAAAAACCCTTGATTATACTCTGTTGGACAAAC |
| | CGAGTGCAATGAATGATGCTTTTCTGAAAATGAAATATAACAAGTGGGTGAA |
| | TGTGGTTATGGCCGAAAAGGATATGCAGTATGCTTAATGGTAGCAACTGAAA |
| | GAAGACATCCTGAGCAGTGCCAGCTTTCTTCTGTTGATGCCGTTCCCTGAAC |
| | ATAGGAAAATAGAAACTTGCTTATCAAAACTTAGCATTACCTTGGTGCTCTG |
| | TGTTCTCTGTTAGCTCAGTGTCTTTCCTTACATCAATAGGTTTTTTTTTTTT |
| | TTTTTGGCCTGAGGAAGTACTGACCATGCCCACAGCCACCGGCTGAGCAAAG |
| | AAGCTCATTTCATGTGAGTTCTAAGGAATGAGAAACAATTTTGATGAATTTA |
| | AGCAGAAAATGAATTTCTGGGAACTTTTTTGGGGGCGGGGGGGTGGGGAATT |
| | CAGCCACACTCCAGAAAGCCAGGAGTCGACAGTTTTGGAAGCCTCTCTCAGG |
| | ATTGAGATTCTAGGATGAGATTGGCTTACTGCTATCTTGTGTCATGTACCCA |
| | CTTTTTGGCCAGACTACACTGGGAAGAAGGTAGTCCTCTAAAGCAAAATCTG |
| | AGTGCCACTAAATGGGGAGATGGGGCTGTTAAGCTGTCCAAATCAACAAGGG |
| | TCATATAAATGGCCTTAAACTTTGGGGTTGCTTTCTGCAAAAAGTTGCTGTG |
| | ACTCATGCCATAGACAAGGTTGAGTGCCTGGACCCAAAGGCAATACTGTAAT |
| | GTAAAGACATTTATAGTACTAGGCAAACAGCACCCCAGGTACTCCAGGCCCT |
| | CCTGGCTGGAGAGGGCTGTGGCAATAGAAAATTAGTGCCAACTGCAGTGAGT |
| | CAGCCTAGGTTAAATAGAGAGTGTAAGAGTGCTGGACAGGAACCTCCACCCT |
| | CATGTCACATTTCTTCAATGTGACCCTTCTGGCCCCTCTCCTCCTGACAGCG |
| | GAACAATGACTGCCCCGATAGGTGAGGCTGGAGGAAGAATCAGTCCTGTCCT |
| | TGGCAAGCTCTTCACTATGACAGTAAAGGCTCTCTGCCTGCTGCCAAGGCCT |
| | GTGACTTTCTAACCTGGCCTCACGCTGGGTAAGCTTAAGGTAGAGGTGCAGG |
| | ATTAGCAAGCCCACCTGGCTACCAGGCCGACAGCTACATCCTCCAACTGACC |
| | CTGATCAACGAAGAGGGATTCATGTGTCTGTCTCAGTTGGTTCCAAATGAAA |
| | CCAGGGAGCAGGGGAGTTAGGAATCGAACACCAGTCATGCCTACTGGCTCTC |
| | TGCTCGAGAGCCAATACCCTGTGCCCTCCACTCATCTGGATTTACAGGAACT |
| | GTCATAGTGTTCAGTATTGGGTGGTGATAAGCCCATTGGATTGTCCCCTTGG |
| | GGGGATGAGCTAGGGGTGCAAGGAACACCTGATGAGTAGATAAGTGGAGCTC |
| | ATGGTATTTCCTGAAAGATGCTAATCTATTTGCCAAACTTGGTCTTGAATGT |
| | ACTGGGGGCTTCAAGGTATGGGTATATTTTTCTTGTGTCCTTGCAGTTAGCC |
| | CCCATGTCTTATGTGTGTCCTGAAAAAATAAGAGCCTGCCCAAGACTTTGGG |
| | CCTCTTGACAGAATTAACCACTTTTATACATCTGAGTTCTCTTGGTAAGTTC |
| | TTTAGCAGTGTTCAAAGTCTACTAGCTCGCATTAGTTTCTGTTGCTGCCAAC |
| | AGATCTGAACTAATGCTAACAGATCCCCCTGAGGGATTCTTGATGGGCTGAG |
| | CAGCTGGCTGGAGCTAGTACTGACTGACATTCATTGTGATGAGGGCAGCTTT |
| | CTGGTACAGGATTCTAAGCTCTATGTTTTATATACATTTTCATCTGTACTTG |
| | CACCTCACTTTACACAAGAGGAAACTATGCAAAGTTAGCTGGATCGCTCAAG |
| | GTCACTTAGGTAAGTTGGCAAGTCCATGCTTCCCACTCAGCTCCTCAGGTCA |
| | GCAAGTCTACTTCTCTGCCTATTTTGTATACTCTCTTTAATATGTGCCTAGC |
| | TTTGGAAAGTCTAGAATGGGTCCCTGGTGCCTTTTTACTTTGAAGAAATCAG |
| | TTTCTGCCTCTTTTTGGAAAAGAAAACAAAGTGCAATTGTTTTTTACTGGAA |
| | AGTTACCCAATAGCATGAGGTGAACAGGACGTAGTTAGGCCTTCCTGTAAAC |
| | AGAAAATCATATCAAAACACTATCTTCCCATCTGTTTCTCAATGCCTGCTAC |
| | TTCTTGTAGATATTTCATTTCAGGAGAGCAGCAGTTAAACCCGTGGATTTTG |
| | TAGTTAGGAACCTGGGTTCAAACCCTCTTCCACTAATTGGCTATGTCTCTGG |
| | ACAAGTTTTTTTTTTTTTTTTTTTTTAAACCCTTTCTGAACTTTCACTTTCT |
| | ATGTCTACCTCAAAGAATTGTTGTGAGGCTTGAGATAATGCATTTGTAAAGG |
| | GTCTGCCAGATAGGAAGATGCTAGTTATGGATTTACAAGGTTGTTAAGGCTG |
| | TAAGAGTCTAAAACCTACAGTGAATCACAATGCATTTACCCCCACTGACTTG |
| | GACATAAGTGAAAACTAGCCAGAAGTCTCTTTTTCAAATTACTTACAGGTTA |
| | TTCAATATAAAATTTTTGTAATGGATAATCTTATTTATCTAAACTAAAGCTT |
| | CCTGTTTATACACACTCCTGTTATTCTGGGATAAGATAAATGACCACAGTAC |
| | CTTAATTTCTAGGTGGGTGCCTGTGATGGTTCATTGTAGGTAAGGACATTTT |
| | CTCTTTTTCAGCAGCTGTGTAGGTCCAGAGCCTCTGGGAGAGGAGGGGGGTA |
| | GCATGCACCCAGCAGGGGACTGAACTGGGAAACTCAAGGTTCTTTTTACTGT |
| | GGGGTAGTGAGCTGCCTTTCTGTGATCGGTTTCCCTAGGGATGTTGCTGTTC |
| | CCCTCCTTGCTATTCGCAGCTACATACAACGTGGCCAACCCCAGTAGGCTGA |
| | TCCTATATATGATCAGTGCTGGTGCTGACTCTCAATAGCCCCACCCAAGCTG |
| | GCTATAGGTTTACAGATACATTAATTAGGCAACCTAAAATATTGATGCTGGT |
| | GTTGGTGTGACATAATGCTATGGCCAGAACTGAAACTTAGAGTTATAATTCA |
| | TGTATTAGGGTTCTCCAGAGGGACAGAATTAGTAGGATATATGTATATATGA |
| | AAGGGAGGTTATTAGGGAGAACTGGCTCCCACAGTTAGAAGGCGAAGTCGCA |
| | CAATAGGCCGTCTGCAAGCTGGGTTAGAGAGAAGCCAGTAGTGGCTCAGCCT |
| | GAGTTCAAAAACCTCAAAACTGGGGAAGCTGACAGTGCAGCCAGCCTTCAGT |
| | CTGTGGCCAAAGGCCCAAGAGCCCCTGGCAACCAACCCACTGGTGCAAGTCC |
| | TAGATTCCAAAGGCTGAAGAACCTGGAGTCTGATGTCCAAGAGCAGGAAGAG |
| | TGGAAGAAAGCCAGAAGACTCAGCAAACAAGGTAGACAGTGTCTACCACCAT |
| | AGTGGCCATACCAAAGAGGCTACCGATTCCTTCCTGCTACCTGGATCCCTGA |
| | AGTTGCCCTGGTCTCTGCACCTTCTAAACCTAGTTCTTAAGAGCTTTCCATT |
| | ACATGAGCTGTCTCAAAGCCCTCCAATAAATTCTCAGTGTAAGCTTCTGTTG |
| | CTTGTGGACAGAAAATTCTGACAGACCTACCCTATAAGTGTTACTGTCAGGA |
| | TAACATGAGAACGCACAACAGTAAGTGGTCACTAAGTGTTAGCTACGGTTAT |
| | TTTGCCCAAGGTAGCATGGCTAGTTGATGCCGGTTGATGGGGCTTAAACCCA |
| | GCTCCCTCATCTTCCAGGCCTCTGTACTCCCTATTCCACTAAACTACCTCTC |
| | AGGTTTATTTTTTTAAATTCTTACTCTGCAAGTACATAGGACCACATTTACC |
| | TGGGAAAACAAGAATAAAGGCTGCTCTGCATTTTTTAGAAACTTTTTTGAAA |
| | GGGAGATGGGAATGCCTGCACCCCCAAGTCCAGACCAACACAATGGTTAATT |
| | GAGATGAATAATAAAGGAAAGACTGTTCTGGGCTTCCCAGAATAGCTTGGTC |
| | CTTAAATTGTGGCACAAACAACCTCCTGTCAGAGCCAGCCTCCTGCCAGGAA |
| | GAGGGGTAGGAGACTAGAGGCCGTGTGTGCAGCCTTGCCCTGAAGGCTAGGG |
| | TGACAATTTGGAGGCTGTCCAAACACCCTGGCCTCTAGAGCTGGCCTGTCTA |
| | TTTGAAATGCCGGCTCTGATGCTAATCGGCGACCCTCAGGCAAGTTACTTAA |
| | CCTTACATGCCTCAGTTTTCTCATCTGGAAAATGAGAACCCTAGGTTTAGGG |
| | TTGTTAGAAAAGTTAAATGAGTTAAGACAAGTGCCTGGGACACAGTAGCCTC |
| | TTGTGTGTGTTTATCATTATGTCCTCAGCAGGTCGTAGAAGCAGCTTCTCAG |
| | GTGTGAGGCTGGCGCGATTATCTGGAGTGGGTTGGGTTTTCTAGGATGGACC |
| | CCCTGCTGCATTTTCCTCATTCATCCACCAGGGCTTAATGGGGAATCAAGGA |
| | ATCCATGTGTAACTGTATAATAACTGTAGCCACACTCCAATGACCACCTACT |
| | AGTTGTCCCTGGCACTGCTTATACATATGTCCATCAAATCAATCCTATGAAG |
| | TAGATACTGTCTTCATTTTATAGATCAGAGACAATTGGGGTTCAGAGAGCTG |
| | ATGTGATTTTCCCAGGGTCACAGAGAGTCCCAGATTCAGGCACAACTCTTGT |
| | ATTCCAAGACACAACCACTACATGTCCAAAGGCTGCCCAGAGCCACCGGGCA |
| | CGGCAAATTGTGACATATCCCTAAAGAGGCTGAGCACCTGGTCAGGATCTGA |
| | TGGCTGACAGTGTGTCCAGATGCAGAGCTGGAGTGGGGGAGGGGAAGGGGGG |
| | CTCCTTGGGACAGAGAAGGCTTTCTGTGCTTTCTCTGAAGGGAGCAGTCTGA |
| | GGACCAAGGGAACCCGGCAAACAGCACCTCAGGTACTCCAGGCCCTCCTGGC |
| | TGGAGAGGGCTGTGGCAATGGAAAATTAGTGCCAACTGCAATGAGTCAGCCT |
| | CGGTTAAATAGAGAGTGAAGAATGCTGGACAGGAACCTCCACCCTCATGTCA |
| | CATTTCTTCAGTGTGACCCTTCTGGCCCCTCTCCTCCTGACAGCGGAACAAT |
| | GACTGCCCCGATAGGTGAGGCTGGAGGAAGAATCAGTCCTGTCCTTGGCAAG |
| | CTCTTCACTATGACAGTAAAGGCTCTCTGCCTGCTGCCAAGGCCTGTGACTT |
| | TCTAACCTGGCCTCACGCTGGGTAAGCTTAAGGTAGAGGTGCAGGATTAGCA |
| | AGCCCACCTGGCTACCAGGCCGACAGCTACATCTTTCAACTGACCCTGATCA |
| | ACGAAGAGGGACTTGTGTCTCTCAGTTGGTTCCAAATGAAACCAGGGAGCAG |
| | GGGCGTTAGGAAGCTCCAACAGGATGGTACTTAATGGGGCATTTGAGTGGAG |
| | AGGTAGGTGACATAGTGCTTTGGAGCCCAGGGAGGGAAAGGTTCTGCTGAAG |
| | TTGAATTCAAGACTGTTCTTTCATCACAAACTTGAGTTTCCTGGACATTTGT |
| | TTGCAGAAACAACCGTAGGGTTTTGCCTTAACCTCGTGGGTTTATTATTACC |
| | TCATAGGGACTTTGCCTCCTGACAGCAGTTTATGGGTGTTCATTGTGGCACT |
| | TGAGTTTTCTTGCATACTTGTTAGAGAAACCAAGTTTGTCATCAACTTCTTA |
| | TTTAACCCCCTGGCTATAACTTCATGGATTATGTTATAATTAAGCCATCCAG |
| | AGTAAAATCTGTTTAGATTATCTTGGAGTAAGGGGGAAAAAATCTGTAATTT |
| | TTTCTCCTCAACTAGATATATACATAAAAAATGATTGTATTGCTTCATTTAA |
| | AAAATATAACGCAAAATCTCTTTTCCTTCT (SEQ |
| | ID NO: 197) |
| | >NP_976075.1 CD59 glycoprotein preproprotein [Homo |
| | sapiens] |
| | MGIQGGSVLFGLLLVLAVFCHSGHSLQCYNCPNPTADCKTAVNCSSDFDACL |
| | ITKAGLQVYNKCWKFEHCNFNDVTTRLRENELTYYCCKKDLCNFNEQLENGG |
| | TSLSEKTVLLLVTPFLAAAWSLHP (SEQ ID NO: 198) |
| Human C1C2 from | NM_005928.4 Homo sapiens milk fat globule-EGF factor 8 |
| MFGE8 | protein (MFGE8), transcript variant 1, mRNA |
| | AGAACCCCGCGGGGTCTGAGCAGCCCAGCGTGCCCATTCCAGCGCCCGCGTCCCCGC |
| | AGCATGCCGCGCCCCCGCCTGCTGGCCGCGCTGTGCGGCGCGCTGCTCTGCGCCCCC |
| | AGCCTCCTCGTCGCCCTGGATATCTGTTCCAAAAACCCCTGCCACAACGGTGGTTTA |
| | TGCGAGGAGATTTCCCAAGAAGTGCGAGGAGATGTCTTCCCCTCGTACACCTGCACG |
| | TGCCTTAAGGGCTACGCGGGCAACCACTGTGAGACGAAATGTGTCGAGCCACTGGGC |
| | CTGGAGAATGGGAACATTGCCAACTCACAGATCGCCGCCTCGTCTGTGCGTGTGACC |
| | TTCTTGGGTTTGCAGCATTGGGTCCCGGAGCTGGCCCGCCTGAACCGCGCAGGCATG |
| | GTCAATGCCTGGACACCCAGCAGCAATGACGATAACCCCTGGATCCAGGTGAACCTG |
| | CTGCGGAGGATGTGGGTAACAGGTGTGGTGACGCAGGGTGCCAGCCGCTTGGCCAGT |
| | CATGAGTACCTGAAGGCCTTCAAGGTGGCCTACAGCCTTAATGGACACGAATTCGAT |
| | TTCATCCATGATGTTAATAAAAAACACAAGGAGTTTGTGGGTAACTGGAACAAAAAC |
| | GCGGTGCATGTCAACCTGTTTGAGACCCCTGTGGAGGCTCAGTACGTGAGATTGTAC |
| | CCCACGAGCTGCCACACGGCCTGCACTCTGCGCTTTGAGCTACTGGGCTGTGAGCTG |
| | AACGGATGCGCCAATCCCCTGGGCCTGAAGAATAACAGCATCCCTGACAAGCAGATC |
| | ACGGCCTCCAGCAGCTACAAGACCTGGGGCTTGCATCTCTTCAGCTGGAACCCCTCC |
| | TATGCACGGCTGGACAAGCAGGGCAACTTCAACGCCTGGGTTGCGGGGAGCTACGGT |
| | AACGATCAGTGGCTGCAGGTGGACCTGGGCTCCTCGAAGGAGGTGACAGGCATCATC |
| | ACCCAGGGGGCCCGTAACTTTGGCTCTGTCCAGTTTGTGGCATCCTACAAGGTTGCC |
| | TACAGTAATGACAGTGCGAACTGGACTGAGTACCAGGACCCCAGGACTGGCAGCAGT |
| | AAGATCTTCCCTGGCAACTGGGACAACCACTCCCACAAGAAGAACTTGTTTGAGACG |
| | CCCATCCTGGCTCGCTATGTGCGCATCCTGCCTGTAGCCTGGCACAACCGCATCGCC |
| | CTGCGCCTGGAGCTGCTGGGCTGTTAGTGGCCACCTGCCACCCCCAGGTCTTCCTGC |
| | TTTCCATGGGCCCGCTGCCTCTTGGCTTCTCAGCCCCTTTAAATCACCATAGGGCTG |
| | GGGACTGGGGAAGGGGAGGGTGTTCAGAGGCAGCACCACCACACAGTCACCCCTCCC |
| | TCCCTCTTTCCCACCCTCCACCTCTCACGGGCCCTGCCCCAGCCCCTAAGCCCCGTC |
| | CCCTAACCCCCAGTCCTCACTGTCCTGTTTTCTTAGGCACTGAGGGATCTGAGTAGG |
| | TCTGGGATGGACAGGAAAGGGCAAAGTAGGGCGTGTGGTTTCCCTGCCCCTGTCCGG |
| | ACCGCCGATCCCAGGTGCGTGTGTCTCTGTCTCTCCTAGCCCCTCTCTCACACATCA |
| | CATTCCCATGGTGGCCTCAAGAAAGGCCCGGAAGCGCCAGGCTGGAGATAACAGCCT |
| | CTTGCCCGTCGGCCCTGCGTCGGCCCTGGGGTACCATGTGGCCACAACTGCTGTGGC |
| | CCCCTGTCCCCAAGACACTTCCCCTTGTCTCCCTGGTTGCCTCTCTTGCCCCTTGTC |
| | CTGAAGCCCAGCGACACAGAAGGGGGTGGGGCGGGTCTATGGGGAGAAAGGGAGCGA |
| | GGTCAGAGGAGGGCATGGGTTGGCAGGGTGGGCGTTTGGGGCCCTCTATGCTGGCTT |
| | TTCACCCCAGAGGACACAGGCAGCTTCCAAAATATATTTATCTTCTTCACGGGAA |
| | (SEQ ID NO: 199) |
| | >NP_005919.2 lactadherin isoform a preproprotein [Homo |
| | sapiens] |
| | MPRPRLLAALCGALLCAPSLLVALDICSKNPCHNGGLCEEISQEVRGDVFPSYTCTC |
| | LKGYAGNHCETKCVEPLGLENGNIANSQIAASSVRVTFLGLQHWVPELARLNRAGMV |
| | NAWTPSSNDDNPWIQVNLLRRMWVTGVVTQGASRLASHEYLKAFKVAYSLNGHEFDF |
| | IHDVNKKHKEFVGNWNKNAVHVNLFETPVEAQYVRLYPTSCHTACTLRFELLGCELN |
| | GCANPLGLKNNSIPDKQITASSSYKTWGLHLFSWNPSYARLDKQGNENAWVAGSYGN |
| | DQWLQVDLGSSKEVTGIITQGARNEGSVQFVASYKVAYSNDSANWTEYQDPRTGSSK |
| | IFPGNWDNHSHKKNLFETPILARYVRILPVAWHNRIALRLELLGC (SEQ ID NO: |
| | 200) |
| Human 4F2(CD98) | >NM_002394.6 Homo sapiens solute carrier family 3 |
| | member 2 (SLC3A2), transcript variant 3, mRNA |
| | GCATTGCGGCTTGGTTTTCTCACCCAGTGCATGTGGCAGGAGCGGTGAGATC |
| | ACTGCCTCACGGCGATCCTGGACTGACGGTCACGACTGCCTACCCTCTAACC |
| | CTGTTCTGAGCTGCCCCTTGCCCACACACCCCAAACCTGTGTGCAGGATCCG |
| | CCTCCATGGAGCTACAGCCTCCTGAAGCCTCGATCGCCGTCGTGTCGATTCC |
| | GCGCCAGTTGCCTGGCTCACATTCGGAGGCTGGTGTCCAGGGTCTCAGCGCG |
| | GGGGACGACTCAGAGTTGGGGTCTCACTGTGTTGCCCAGACTGGTCTCGAAC |
| | TCTTGGCCTCAGGTGATCCTCTTCCCTCAGCTTCCCAGAATGCCGAGATGAT |
| | AGAGACGGGGTCTGACTGTGTTACCCAGGCTGGTCTTCAACTCTTGGCCTCA |
| | AGTGATCCTCCTGCCTTAGCTTCCAAGAATGCTGAGGTTACAGGCACCATGA |
| | GCCAGGACACCGAGGTGGATATGAAGGAGGTGGAGCTGAATGAGTTAGAGCC |
| | CGAGAAGCAGCCGATGAACGCGGCGTCTGGGGCGGCCATGTCCCTGGCGGGA |
| | GCCGAGAAGAATGGTCTGGTGAAGATCAAGGTGGCGGAAGACGAGGCGGAGG |
| | CGGCAGCCGCGGCTAAGTTCACGGGCCTGTCCAAGGAGGAGCTGCTGAAGGT |
| | GGCAGGCAGCCCCGGCTGGGTACGCACCCGCTGGGCACTGCTGCTGCTCTTC |
| | TGGCTCGGCTGGCTCGGCATGCTTGCTGGTGCCGTGGTCATAATCGTGCGAG |
| | CGCCGCGTTGTCGCGAGCTACCGGCGCAGAAGTGGTGGCACACGGGCGCCCT |
| | CTACCGCATCGGCGACCTTCAGGCCTTCCAGGGCCACGGCGCGGGCAACCTG |
| | GCGGGTCTGAAGGGGCGTCTCGATTACCTGAGCTCTCTGAAGGTGAAGGGCC |
| | TTGTGCTGGGTCCAATTCACAAGAACCAGAAGGATGATGTCGCTCAGACTGA |
| | CTTGCTGCAGATCGACCCCAATTTTGGCTCCAAGGAAGATTTTGACAGTCTC |
| | TTGCAATCGGCTAAAAAAAAGAGCATCCGTGTCATTCTGGACCTTACTCCCA |
| | ACTACCGGGGTGAGAACTCGTGGTTCTCCACTCAGGTTGACACTGTGGCCAC |
| | CAAGGTGAAGGATGCTCTGGAGTTTTGGCTGCAAGCTGGCGTGGATGGGTTC |
| | CAGGTTCGGGACATAGAGAATCTGAAGGATGCATCCTCATTCTTGGCTGAGT |
| | GGCAAAATATCACCAAGGGCTTCAGTGAAGACAGGCTCTTGATTGCGGGGAC |
| | TAACTCCTCCGACCTTCAGCAGATCCTGAGCCTACTCGAATCCAACAAAGAC |
| | TTGCTGTTGACTAGCTCATACCTGTCTGATTCTGGTTCTACTGGGGAGCATA |
| | CAAAATCCCTAGTCACACAGTATTTGAATGCCACTGGCAATCGCTGGTGCAG |
| | CTGGAGTTTGTCTCAGGCAAGGCTCCTGACTTCCTTCTTGCCGGCTCAACTT |
| | CTCCGACTCTACCAGCTGATGCTCTTCACCCTGCCAGGGACCCCTGTTTTCA |
| | GCTACGGGGATGAGATTGGCCTGGATGCAGCTGCCCTTCCTGGACAGCCTAT |
| | GGAGGCTCCAGTCATGCTGTGGGATGAGTCCAGCTTCCCTGACATCCCAGGG |
| | GCTGTAAGTGCCAACATGACTGTGAAGGGCCAGAGTGAAGACCCTGGCTCCC |
| | TCCTTTCCTTGTTCCGGCGGCTGAGTGACCAGCGGAGTAAGGAGCGCTCCCT |
| | ACTGCATGGGGACTTCCACGCGTTCTCCGCTGGGCCTGGACTCTTCTCCTAT |
| | ATCCGCCACTGGGACCAGAATGAGCGTTTTCTGGTAGTGCTTAACTTTGGGG |
| | ATGTGGGCCTCTCGGCTGGACTGCAGGCCTCCGACCTGCCTGCCAGCGCCAG |
| | CCTGCCAGCCAAGGCTGACCTCCTGCTCAGCACCCAGCCAGGCCGTGAGGAG |
| | GGCTCCCCTCTTGAGCTGGAACGCCTGAAACTGGAGCCTCACGAAGGGCTGC |
| | TGCTCCGCTTCCCCTACGCGGCCTGACTTCAGCCTGACATGGACCCACTACC |
| | CTTCTCCTTTCCTTCCCAGGCCCTTTGGCTTCTGATTTTTCTCTTTTTTAAA |
| | AACAAACAAACAAACTGTTGCAGATTATGAGTGAACCCCCAAATAGGGTGTT |
| | TTCTGCCTTCAAATAAAAGTCACCCCTGCATGGTGAA (SEQ ID NO: 201) |
| | >NP_002385.3 4F2 cell-surface antigen heavy chain |
| | isoform c [Homo sapiens] |
| | MELQPPEASIAVVSIPRQLPGSHSEAGVQGLSAGDDSELGSHCVAQTGLELL |
| | ASGDPLPSASQNAEMIETGSDCVTQAGLQLLASSDPPALASKNAEVTGTMSQ |
| | DTEVDMKEVELNELEPEKQPMNAASGAAMSLAGAEKNGLVKIKVAEDEAEAA |
| | AAAKFTGLSKEELLKVAGSPGWVRTRWALLLLFWLGWLGMLAGAVVIIVRAP |
| | RCRELPAQKWWHTGALYRIGDLQAFQGHGAGNLAGLKGRLDYLSSLKVKGLV |
| | LGPIHKNQKDDVAQTDLLQIDPNFGSKEDFDSLLQSAKKKSIRVILDLTPNY |
| | RGENSWFSTQVDTVATKVKDALEFWLQAGVDGFQVRDIENLKDASSFLAEWQ |
| | NITKGFSEDRLLIAGTNSSDLQQILSLLESNKDLLLTSSYLSDSGSTGEHTK |
| | SLVTQYLNATGNRWCSWSLSQARLLTSFLPAQLLRLYQLMLFTLPGTPVFSY |
| | GDEIGLDAAALPGQPMEAPVMLWDESSFPDIPGAVSANMTVKGQSEDPGSLL |
| | SLFRRLSDQRSKERSLLHGDFHAFSAGPGLFSYIRHWDQNERFLVVLNFGDV |
| | GLSAGLQASDLPASASLPAKADLLLSTQPGREEGSPLELERLKLEPHEGLLL |
| | RFPYAA (SEQ ID NO: 202) |
| Human TFR2 | >NM_003227.4 Homo sapiens transferrin receptor 2 |
| | (TFR2), transcript variant 1, mRNA |
| | ATCGCTGGGGGACAGCCTGCAGGCTTCAGGAGGGGACACAAGCATGGAGCGG |
| | CTTTGGGGTCTATTCCAGAGAGCGCAACAACTGTCCCCAAGATCCTCTCAGA |
| | CCGTCTACCAGCGTGTGGAAGGCCCCCGGAAAGGGCACCTGGAGGAGGAAGA |
| | GGAAGACGGGGAGGAGGGGGCGGAGACATTGGCCCACTTCTGCCCCATGGAG |
| | CTGAGGGGCCCTGAGCCCCTGGGCTCTAGACCCAGGCAGCCAAACCTCATTC |
| | CCTGGGCGGCAGCAGGACGGAGGGCTGCCCCCTACCTGGTCCTGACGGCCCT |
| | GCTGATCTTCACTGGGGCCTTCCTACTGGGCTACGTCGCCTTCCGAGGGTCC |
| | TGCCAGGCGTGCGGAGACTCTGTGTTGGTGGTCAGTGAGGATGTCAACTATG |
| | AGCCTGACCTGGATTTCCACCAGGGCAGACTCTACTGGAGCGACCTCCAGGC |
| | CATGTTCCTGCAGTTCCTGGGGGAGGGGCGCCTGGAGGACACCATCAGGCAA |
| | ACCAGCCTTCGGGAACGGGTGGCAGGCTCGGCCGGGATGGCCGCTCTGACTC |
| | AGGACATTCGCGCGGCGCTCTCCCGCCAGAAGCTGGACCACGTGTGGACCGA |
| | CACGCACTACGTGGGGCTGCAATTCCCGGATCCGGCTCACCCCAACACCCTG |
| | CACTGGGTCGATGAGGCCGGGAAGGTCGGAGAGCAGCTGCCGCTGGAGGACC |
| | CTGACGTCTACTGCCCCTACAGCGCCATCGGCAACGTCACGGGAGAGCTGGT |
| | GTACGCCCACTACGGGCGGCCCGAAGACCTGCAGGACCTGCGGGCCAGGGGC |
| | GTGGATCCAGTGGGCCGCCTGCTGCTGGTGCGCGTGGGGGTGATCAGCTTCG |
| | CCCAGAAGGTGACCAATGCTCAGGACTTCGGGGCTCAAGGAGTGCTCATATA |
| | CCCAGAGCCAGCGGACTTCTCCCAGGACCCACCCAAGCCAAGCCTGTCCAGC |
| | CAGCAGGCAGTGTATGGACATGTGCACCTGGGAACTGGAGACCCCTACACAC |
| | CTGGCTTCCCTTCCTTCAATCAAACCCAGTTCCCTCCAGTTGCATCATCAGG |
| | CCTTCCCAGCATCCCAGCCCAGCCCATCAGTGCAGACATTGCCTCCCGCCTG |
| | CTGAGGAAGCTCAAAGGCCCTGTGGCCCCCCAAGAATGGCAGGGGAGCCTCC |
| | TAGGCTCCCCTTATCACCTGGGCCCCGGGCCACGACTGCGGCTAGTGGTCAA |
| | CAATCACAGGACCTCCACCCCCATCAACAACATCTTCGGCTGCATCGAAGGC |
| | CGCTCAGAGCCAGATCACTACGTTGTCATCGGGGCCCAGAGGGATGCATGGG |
| | GCCCAGGAGCAGCTAAATCCGCTGTGGGGACGGCTATACTCCTGGAGCTGGT |
| | GCGGACCTTTTCCTCCATGGTGAGCAACGGCTTCCGGCCCCGCAGAAGTCTC |
| | CTCTTCATCAGCTGGGACGGTGGTGACTTTGGAAGCGTGGGCTCCACGGAGT |
| | GGCTAGAGGGCTACCTCAGCGTGCTGCACCTCAAAGCCGTAGTGTACGTGAG |
| | CCTGGACAACGCAGTGCTGGGGGATGACAAGTTTCATGCCAAGACCAGCCCC |
| | CTTCTGACAAGTCTCATTGAGAGTGTCCTGAAGCAGGTGGATTCTCCCAACC |
| | ACAGTGGGCAGACTCTCTATGAACAGGTGGTGTTCACCAATCCCAGCTGGGA |
| | TGCTGAGGTGATCCGGCCCCTACCCATGGACAGCAGTGCCTATTCCTTCACG |
| | GCCTTTGTGGGAGTCCCTGCCGTCGAGTTCTCCTTTATGGAGGACGACCAGG |
| | CCTACCCATTCCTGCACACAAAGGAGGACACTTATGAGAACCTGCATAAGGT |
| | GCTGCAAGGCCGCCTGCCCGCCGTGGCCCAGGCCGTGGCCCAGCTCGCAGGG |
| | CAGCTCCTCATCCGGCTCAGCCACGATCGCCTGCTGCCCCTCGACTTCGGCC |
| | GCTACGGGGACGTCGTCCTCAGGCACATCGGGAACCTCAACGAGTTCTCTGG |
| | GGACCTCAAGGCCCGCGGGCTGACCCTGCAGTGGGTGTACTCGGCGCGGGGG |
| | GACTACATCCGGGCGGCGGAAAAGCTGCGGCAGGAGATCTACAGCTCGGAGG |
| | AGAGAGACGAGCGACTGACACGCATGTACAACGTGCGCATAATGCGGGTGGA |
| | GTTCTACTTCCTTTCCCAGTACGTGTCGCCAGCCGACTCCCCGTTCCGCCAC |
| | ATCTTCATGGGCCGTGGAGACCACACGCTGGGCGCCCTGCTGGACCACCTGC |
| | GGCTGCTGCGCTCCAACAGCTCCGGGACCCCCGGGGCCACCTCCTCCACTGG |
| | CTTCCAGGAGAGCCGTTTCCGGCGTCAGCTAGCCCTGCTCACCTGGACGCTG |
| | CAAGGGGCAGCCAATGCGCTTAGCGGGGATGTCTGGAACATTGATAACAACT |
| | TCTGAGGCCCTGGGGATCCTCACATCCCCGTCCCCCAGTCAAGAGCTCCTCT |
| | GCTCCTCGCTTGAATGATTCAGGGTCAGGGAGGTGGCTCAGAGTCCACCTCT |
| | CATTGCTGATCAATTTCTCATTACCCCTACACATCTCTCCACGGAGCCCAGA |
| | CCCCAGCACAGATATCCACACACCCCAGCCCTGCAGTGTAGCTGACCCTAAT |
| | GTGACGGTCATACTGTCGGTTAATCAGAGAGTAGCATCCCTTCAATCACAGC |
| | CCCTTCCCCTTTCTGGGGTCCTCCATACCTAGAGACCACTCTGGGAGGTTTG |
| | CTAGGCCCTGGGACCTGGCCAGCTCTGTTAGTGGGAGAGATCGCTGGCACCA |
| | TAGCCTTATGGCCAACAGGTGGTCTGTGGTGAAAGGGGCGTGGAGTTTCAAT |
| | ATCAATAAACCACCTGATATCAATAA (SEQ ID NO: 203) |
| | >NP_003218.2 transferrin receptor protein 2 isoform 1 |
| | [Homo sapiens] |
| | MERLWGLFQRAQQLSPRSSQTVYQRVEGPRKGHLEEEEEDGEEGAETLAHFC |
| | PMELRGPEPLGSRPRQPNLIPWAAAGRRAAPYLVLTALLIFTGAFLLGYVAF |
| | RGSCQACGDSVLVVSEDVNYEPDLDFHQGRLYWSDLQAMFLQFLGEGRLEDT |
| | IRQTSLRERVAGSAGMAALTQDIRAALSRQKLDHVWTDTHYVGLQFPDPAHP |
| | NTLHWVDEAGKVGEQLPLEDPDVYCPYSAIGNVTGELVYAHYGRPEDLQDLR |
| | ARGVDPVGRLLLVRVGVISFAQKVTNAQDFGAQGVLIYPEPADFSQDPPKPS |
| | LSSQQAVYGHVHLGTGDPYTPGFPSFNQTQFPPVASSGLPSIPAQPISADIA |
| | SRLLRKLKGPVAPQEWQGSLLGSPYHLGPGPRLRLVVNNHRTSTPINNIFGC |
| | IEGRSEPDHYVVIGAQRDAWGPGAAKSAVGTAILLELVRTFSSMVSNGFRPR |
| | RSLLFISWDGGDFGSVGSTEWLEGYLSVLHLKAVVYVSLDNAVLGDDKFHAK |
| | TSPLLTSLIESVLKQVDSPNHSGQTLYEQVVFTNPSWDAEVIRPLPMDSSAY |
| | SFTAFVGVPAVEFSFMEDDQAYPFLHTKEDTYENLHKVLQGRLPAVAQAVAQ |
| | LAGQLLIRLSHDRLLPLDFGRYGDVVLRHIGNLNEFSGDLKARGLTLQWVYS |
| | ARGDYIRAAEKLRQEIYSSEERDERLTRMYNVRIMRVEFYFLSQYVSPADSP |
| | FRHIFMGRGDHTLGALLDHLRLLRSNSSGTPGATSSTGFQESRFRRQLALLT |
| | WTLQGAANALSGDVWNIDNNF |
| | (SEQ ID NO: 204) |
| Human ADAM10 | >NM_001110.4 Homo sapiens ADAM metallopeptidase |
| | domain 10 (ADAM10), transcript variant 1, mRNA |
| | GTTGCCGGCCCCTGAAGTGGAGCGAGAGGGAGGTGCTTCGCCGTTTCTCCTG |
| | CCAGGGGAGGTCCCGGCTTCCCGTGGAGGCTCCGGACCAAGCCCCTTCAGCT |
| | TCTCCCTCCGGATCGATGTGCTGCTGTTAACCCGTGAGGAGGCGGCGGCGGC |
| | GGCAGCGGCAGCGGAAGATGGTGTTGCTGAGAGTGTTAATTCTGCTCCTCTC |
| | CTGGGCGGCGGGGATGGGAGGTCAGTATGGGAATCCTTTAAATAAATATATC |
| | AGACATTATGAAGGATTATCTTACAATGTGGATTCATTACACCAAAAACACC |
| | AGCGTGCCAAAAGAGCAGTCTCACATGAAGACCAATTTTTACGTCTAGATTT |
| | CCATGCCCATGGAAGACATTTCAACCTACGAATGAAGAGGGACACTTCCCTT |
| | TTCAGTGATGAATTTAAAGTAGAAACATCAAATAAAGTACTTGATTATGATA |
| | CCTCTCATATTTACACTGGACATATTTATGGTGAAGAAGGAAGTTTTAGCCA |
| | TGGGTCTGTTATTGATGGAAGATTTGAAGGATTCATCCAGACTCGTGGTGGC |
| | ACATTTTATGTTGAGCCAGCAGAGAGATATATTAAAGACCGAACTCTGCCAT |
| | TTCACTCTGTCATTTATCATGAAGATGATATTAACTATCCCCATAAATACGG |
| | TCCTCAGGGGGGCTGTGCAGATCATTCAGTATTTGAAAGAATGAGGAAATAC |
| | CAGATGACTGGTGTAGAGGAAGTAACACAGATACCTCAAGAAGAACATGCTG |
| | CTAATGGTCCAGAACTTCTGAGGAAAAAACGTACAACTTCAGCTGAAAAAAA |
| | TACTTGTCAGCTTTATATTCAGACTGATCATTTGTTCTTTAAATATTACGGA |
| | ACACGAGAAGCTGTGATTGCCCAGATATCCAGTCATGTTAAAGCGATTGATA |
| | CAATTTACCAGACCACAGACTTCTCCGGAATCCGTAACATCAGTTTCATGGT |
| | GAAACGCATAAGAATCAATACAACTGCTGATGAGAAGGACCCTACAAATCCT |
| | TTCCGTTTCCCAAATATTGGTGTGGAGAAGTTTCTGGAATTGAATTCTGAGC |
| | AGAATCATGATGACTACTGTTTGGCCTATGTCTTCACAGACCGAGATTTTGA |
| | TGATGGCGTACTTGGTCTGGCTTGGGTTGGAGCACCTTCAGGAAGCTCTGGA |
| | GGAATATGTGAAAAAAGTAAACTCTATTCAGATGGTAAGAAGAAGTCCTTAA |
| | ACACTGGAATTATTACTGTTCAGAACTATGGGTCTCATGTACCTCCCAAAGT |
| | CTCTCACATTACTTTTGCTCACGAAGTTGGACATAACTTTGGATCCCCACAT |
| | GATTCTGGAACAGAGTGCACACCAGGAGAATCTAAGAATTTGGGTCAAAAAG |
| | AAAATGGCAATTACATCATGTATGCAAGAGCAACATCTGGGGACAAACTTAA |
| | CAACAATAAATTCTCACTCTGTAGTATTAGAAATATAAGCCAAGTTCTTGAG |
| | AAGAAGAGAAACAACTGTTTTGTTGAATCTGGCCAACCTATTTGTGGAAATG |
| | GAATGGTAGAACAAGGTGAAGAATGTGATTGTGGCTATAGTGACCAGTGTAA |
| | AGATGAATGCTGCTTCGATGCAAATCAACCAGAGGGAAGAAAATGCAAACTG |
| | AAACCTGGGAAACAGTGCAGTCCAAGTCAAGGTCCTTGTTGTACAGCACAGT |
| | GTGCATTCAAGTCAAAGTCTGAGAAGTGTCGGGATGATTCAGACTGTGCAAG |
| | GGAAGGAATATGTAATGGCTTCACAGCTCTCTGCCCAGCATCTGACCCTAAA |
| | CCAAACTTCACAGACTGTAATAGGCATACACAAGTGTGCATTAATGGGCAAT |
| | GTGCAGGTTCTATCTGTGAGAAATATGGCTTAGAGGAGTGTACGTGTGCCAG |
| | TTCTGATGGCAAAGATGATAAAGAATTATGCCATGTATGCTGTATGAAGAAA |
| | ATGGACCCATCAACTTGTGCCAGTACAGGGTCTGTGCAGTGGAGTAGGCACT |
| | TCAGTGGTCGAACCATCACCCTGCAACCTGGATCCCCTTGCAACGATTTTAG |
| | AGGTTACTGTGATGTTTTCATGCGGTGCAGATTAGTAGATGCTGATGGTCCT |
| | CTAGCTAGGCTTAAAAAAGCAATTTTTAGTCCAGAGCTCTATGAAAACATTG |
| | CTGAATGGATTGTGGCTCATTGGTGGGCAGTATTACTTATGGGAATTGCTCT |
| | GATCATGCTAATGGCTGGATTTATTAAGATATGCAGTGTTCATACTCCAAGT |
| | AGTAATCCAAAGTTGCCTCCTCCTAAACCACTTCCAGGCACTTTAAAGAGGA |
| | GGAGACCTCCACAGCCCATTCAGCAACCCCAGCGTCAGCGGCCCCGAGAGAG |
| | TTATCAAATGGGACACATGAGACGCTAACTGCAGCTTTTGCCTTGGTTCTTC |
| | CTAGTGCCTACAATGGGAAAACTTCACTCCAAAGAGAAACCTATTAAGTCAT |
| | CATCTCCAAACTAAACCCTCACAAGTAACAGTTGAAGAAAAAATGGCAAGAG |
| | ATCATATCCTCAGACCAGGTGGAATTACTTAAATTTTAAAGCCTGAAAATTC |
| | CAATTTGGGGGTGGGAGGTGGAAAAGGAACCCAATTTTCTTATGAACAGATA |
| | TTTTTAACTTAATGGCACAAAGTCTTAGAATATTATTATGTGCCCCGTGTTC |
| | CCTGTTCTTCGTTGCTGCATTTTCTTCACTTGCAGGCAAACTTGGCTCTCAA |
| | TAAACTTTTACCACAAATTGAAATAAATATATTTTTTTCAACTGCCAATCAA |
| | GGCTAGGAGGCTCGACCACCTCAACATTGGAGACATCACTTGCCAATGTACA |
| | TACCTTGTTATATGCAGACATGTATTTCTTACGTACACTGTACTTCTGTGTG |
| | CAATTGTAAACAGAAATTGCAATATGGATGTTTCTTTGTATTATAAAATTTT |
| | TCCGCTCTTAATTAAAAATTACTGTTTAATTGACATACTCAGGATAACAGAG |
| | AATGGTGGTATTCAGTGGTCCAGGATTCTGTAATGCTTTACACAGGCAGTTT |
| | TGAAATGAAAATCAATTTACCTTTCTGTTACGATGGAGTTGGTTTTGATACT |
| | CATTTTTTCTTTATCACATGGCTGCTACGGGCACAAGTGACTATACTGAAGA |
| | ACACAGTTAAGTGTTGTGCAAACTGGACATAGCAGCACATACTACTTCAGAG |
| | TTCATGATGTAGATGTCTGGTTTCTGCTTACGTCTTTTAAACTTTCTAATTC |
| | AATTCCATTTTTCAATTAATAGGTGAAATTTTATTCATGCTTTGATAGAAAT |
| | TATGTCAATGAAATGATTCTTTTTATTTGTAGCCTACTTATTTGTGTTTTTC |
| | ATATATCTGAAATATGCTAATTATGTTTTCTGTCTGATATGGAAAAGAAAAG |
| | CTGTGTCTTTATCAAAATATTTAAACGGTTTTTTCAGCATATCATCACTGAT |
| | CATTGGTAACCACTAAAGATGAGTAATTTGCTTAAGTAGTAGTTAAAATTGT |
| | AGATAGGCCTTCTGACATTTTTTTTCCTAAAATTTTTAACAGCATTGAAGGT |
| | GAAACAGCACAATGTCCCATTCCAAATTTATTTTTGAAACAGATGTAAATAA |
| | TTGGCATTTTAAAGAGAAAGCAAAAACATTTAATGTATTAACAGGCTTATTG |
| | CTATGCAGGAAATAGAAGGGGCATTACAAAAATTGAAGCTTGTGACATATTT |
| | ATTGCTTCTGTTTTCCAACTACATCACTTCAACTAGAAGTAAAGCTATGATT |
| | TTCCTGACTTCACATAGGAGGCAAATTTAGAGAAAGTTGTAAAGATTTCTAT |
| | GTTTTGGGTTTTTTTTTTTCCTTTTTTTTTTTAAGAGTATAAGGTTTACACA |
| | ATCATTCTCATAATGTGACGCAAGCCAGCAAGGCCAAAAATGCTAGAGAAAA |
| | TAACGGGATCTCTTCCTTGTAAACTTGTACAGTATGTGGTGACTTTTTCAAA |
| | ATACAGCTTTTTGTACATGATTTAGAGACAAATTTTGTACATGAAACCCCAG |
| | ATAGACTATAAATAATTCTAAACAAACAAGTAGGTAGATATGTATGTAATTG |
| | CTTTTAAATCATTTAAATGCCTTTGTTTTTGGACTGTGCAAAGGTTGGAAGT |
| | GGGTTTGCATTTCTAAAATGGTGACTTTTATTCTGCAAGAGTTCTTAGTAAC |
| | TTCTTGAGTGTGGTAGACTTTGGAACATGTAAATTTTTTGCTTGTAATGTTA |
| | TCCTGTGGTAGGATTTTGGCAGGTACACACACTGCCCTATTTTATTTTGAGT |
| | CTAAGTTAAATGTTTTCTGAAAAGAGATACATGCACTGAACTCTTTCCACTG |
| | CGAATCAAGATGTGGTAATATAAAAGGATCAAGACAAATGAGATCTAATACT |
| | ACTGTCAGTTTTAATGTCCACTGTGTTTTATACAGTATCTTTTTTTGTTCAC |
| | TTTGGAAATTTTTACTAAAAATTGCAAAAAATAAAGTATTGTGCAAAGATGT |
| | AAGGTTTTTTGAAACTTGAAATGCATTAATAAATAGACGATTAAATCAACTT |
| | GAAGGTTCTATACTCTTTGAACTCTGAGAACTATCACAAGAAGCTTCCCACA |
| | AGGCAGTGTTTTCTTACAGTTGTCTCTTCCTACAAAAGTATAGATTATCTTT |
| | ATTCTTAATACTTTGGAATCCATGTAGAAAATTTCCAGTTAGATACTCTGCG |
| | TACACACAATAAACCTTTTTAAAACACCCAACTAATCTCAACTGCATTACAT |
| | TGTTTCTAATCAATATTCAGTGCTTGTCTTGGTGGAAGAGGTGAGTCATTTT |
| | GAAAACTTATGGTCTTGTTTTTATGTGTTTTTCAAAGTTTTGAATGCTAAGT |
| | ACCTCATTTATTTTAAAAAGCCTAGTTTAATGATAAGTTTGTTTAAAATTTT |
| | GAGCCATCATTTTTCTCTTCATAGCAAATAAGGAGAGAATTGACATTTCAGT |
| | GTTACCTAGAAAAGGAATTGTAAGCCCAGAATAATTCCCTGCATGAGGTAAT |
| | CTGCTTCAAATTCTTTTTTTAGTCAAGGTTAGCTATAAGTAATACTTGTTAA |
| | ATGAGTAAATATGTAATACTTTGTGAATTACTTTGTTAATTTAGGAGCATCA |
| | AATGTATATTATGTTTAGTTATTTATGAAACTCTCAATATTGATTGATTTGG |
| | GTAATTATAAATTAGTTATTTTTACTTGTAATTGAATGCTTAAATTCTGTTT |
| | ACAGTCCGTCCTCTCTCCCTCCATCCCTCCCTCCCCAGTTTTATAAATTCAG |
| | GTACCAATTCACAAACAAAATCAGAAATAAAATAAATTTATTGACTGCTTCT |
| | GGATTTAGCATTCCCTGTAGTGTCAAGCAATGTCATGCAGTTTGGGGAAGCA |
| | TTTATTTAAGGAAATGACAACTTTCTCTGATCAGTCTTGTTTTGTGAGGTGT |
| | CTTCAACACTTTATGCTTTGGGTACTTCGTGTTTGTCACAGTCTTAGGATAG |
| | TGAAATCTGATTTGTCCAAGCGGAGCAAACTACTCGACCCTCAGTCCTTGTA |
| | TTTGTCCCTGTAGTAAGACCTAATTATTATTATTTCTTAAAGATGGGATTGG |
| | TGTCCTTGGCAACTATGAAATTTCGGGGCTTGTGCATGAGAAGGCATTTCTT |
| | ATTAAGTATTTCTAATTGAAGGTATCAGAGTGTCAAGCATTACAAACCTGGA |
| | CAGTTCACCTGGAGGAGTACAAGAAGAGATATTCATTATCCATATTTAAAGG |
| | GTCAAGGTTTCCCAAAACCAGGGTGCAAGCCAGATGTAGTTTTAAAGCAGCT |
| | GCCAGGGACAGTTCATCTTTAGAGAAGTCACTAAAGTTGTAAGAAATTTTAG |
| | TTTCCCCAAAACCACTTTCAACTTCTTAGAAACTAGAAAGACAATTGGTTTG |
| | CCCCACAGAGGACAACTTCAGTTTCAGCATCTCTCATGTTGTGTTCTTGATT |
| | AAAAACAACTTCCATTTGATATACTTTTCCGTTTATTACCAGTTTAGTTTTT |
| | TCACTATTGTTTCTGTATTCAACTCTTTATATGATTAGGATAGAAATTTAGC |
| | CCTTCTGTTTTATATTACTATATTGTTTGTGTGTCTTAGATATATACATGTA |
| | TGTACTATTTTCAGTAGAAATTCATGTATTTTATAATTGGTAAGTTCTTCAG |
| | AGCATCTCTTCTATAAAAAGCAACAGGATGCTAGGTAAAACGGAGCATTGAG |
| | CAAAATACTGATTAGTTTTTGCTTTTTCCTGAAATCTACACTAAAGTGATAG |
| | GGTGTGGGGTAATCCAACAAGGACAAGGTGAATTGAACAAGAACGAAATCTG |
| | GAAGCAGATGAAGGAGTACTATTGATTGGGCAGACCCAGGGAAGTCAAATCC |
| | TAAACCAGCAGTGGGAACACAACAGAATGGTGTAGTTTGCACTGGTAAGATT |
| | TGGGTACCTGGCAGGGCTGGGTGCGGTGGCTCACACCTGTAATCCCAGCACT |
| | TTGGGAGGCCAAGGCGGGTGGATCACTTGAGGTCAGGAGTTCGAGACCACCC |
| | TGGCCAACATGGTGAAACCCCGTCTCTACTAAAAATACAGCTGGGCGTGGTG |
| | GCACATGCTTGTAATCCCAGCTACTCGGGAGGCAGAGGCAGGAGATTTGCTT |
| | GAACCCGGGAGGCAGAGGCAGGAGATTTGCTTGAACCCAGGAGGCAGAGGCT |
| | GCAGTGAGCCGCGATTGCGCCATTGCACTCCAGCCTGGGTGACAGAGCGAGA |
| | CTCTGTCTCAAAAAAAAAAAAAAAAAAAAAAAAAAAAAAAAAAAAAAAAAAA |
| | AAAAATTTGAGTACCTGGCCTTTGTTACTTTTTTTCTATGTGTGTGACAAAA |
| | ACATAATATGCACACTTTTGTAACCCACCTTTCTCATTTAATGGTACATTGA |
| | TAATGTATATCACATTAACTACTCTAAATATTTCTGTGGATGTATGTTTTTT |
| | TTTTTCTTAACCAATTTCCCATTGTTTGGACATGTAGGTTCCACATTGTTTA |
| | TTATTTTAAACAATTCTAAAGAATTTTAAACAATTCTTAGGAAAATCCTCAG |
| | CCTAATAATGAAATTAATTCCTAAAAGTGGAATTGTTGGGGTAAAGGTTTTT |
| | TGAGGGACATTGATAAAAATTATGGTACTGTCTCCCAGATAGATGTACCAAG |
| | TTATACTACCACGATTTAATATATATATATATATATATTAAATCAGAGTCCC |
| | ATCCTTAGAAATCCACATATATGCAGCCACATGAATGTATTAGAAACAATAA |
| | TAGAAGACTCATGCTTAATTCAGTTGATTAGCTTTAGACATAATTCAAATGC |
| | AAGTCAAATTGAGTGCCCTAATTGTGGTCTCTTAAGTACCATTTTTCTTCAA |
| | GGGAACCAGACTCCTTTGGATAAATCACTAATTCCACCTGTAAGAAAGAAAT |
| | GTACAAGAAGAACCTAGGAAACATTGTTTTGTACCAGATCAGAAAGATTCAG |
| | GAGGCACCTTAGAAGTTACCACTGGCCAAGGCTGAGATAACTTTAGCATCAG |
| | CAAGGATAATATCTGCAAGAGATTGAAACTCATAGTATTGTATTTAACTCTG |
| | TGAGTTAATGATGGTAGTGGACAGAATTATAGTTACCTTTGGGATACGCTTT |
| | TAAAGAAATTCCAGGTAATAAGAGAAATGATAGAATTAGGATATCACCATTT |
| | TACCCCCCCAACAATTTATGGATCTAGACAATAATCGCCAGTGACTGCTAAC |
| | CTCACAAAGTGAGAGCAATCAGATTTTGTGCCTCCTAATGGAAGTACATATA |
| | CCACCTATGAAGCAGTTCTGCCAAAAGTCACATCTCATCATGATGAAGCCTC |
| | CTGATCTAACTACCCCTTCATTAGAAATACAGGGGACAGAGGGACAAATAAT |
| | ATACAAGGGACTCAATCAGCAAAATCCAGACTCTGGAAAACTACAAGACATA |
| | TGGTCCTGCTTCAACAACAGAAATGCAAAGAGAAAAGACAACGATGGGTTAA |
| | AGGAGACTTAAGAGCTACATCTATCAAGACAATTTATGGACTTATTTGGATA |
| | CTGATTTGAACAAACTGTTGAGACCATTGGAAAAATGTGAAAAGTGGATATT |
| | TGATATTAAGGTTTTTAATTATTTTTAGGTGTGATAATGGTATTGTTACATT |
| | TTTTAAAGGACCCCTTTTAGAGATGCAAATTGAAACACTTAAAAAATGAAAT |
| | GATACGATGTATAAGTTTTTGCTTAAAAATAAGGATTGAAGTTGGCTGGTGT |
| | GTGTGGATATAGTTGAAACAAGATTGGCTGTGAGTTGATAATTATTGAAGCT |
| | GGGTGATGGGCACTTGGGGATTTATTATACTATTTTCTCTACCTGTGTTTAT |
| | ATTTGAAATTTTTCATAGAAGTTTTAAAATGTGGCCAGTTGTGATGGCTCAT |
| | ACCTGTAATCCCAACACTTTGGGAGGCCAAGGTGGGAGGATCACTTGAGCTC |
| | AGGAGTTAGAGACCAGCCTGGGCAAAATAGTGAGACTCCATCTCAAAGAAAA |
| | AAAAAAAGTGTTTTAAATGTGAATCAAATTCCTATAGAAGCTGATTCATTAC |
| | TGTTTTTATTTTAGCAGTAATTCATGATAATGACCTGTATTCATAATGATTT |
| | TCATAATGATTGTTTTAGTGGAATTAAACTTGAACCAGTCAAGCTAACATAA |
| | TTATATTCTGCTCCAGTTACAATGAATAATTAATTGATTTCAACTGCTAGGG |
| | TGAACTCTTGAAGCTATCAGTCATCCAGCAATCTTAGCAAGCAGGCCATTGG |
| | GTCCCTGTTTGCTCTGTCTCTCTCTCTCTCTCTCACTGTTGAAGGGCTTAGC |
| | TAACTACTTAAGTAAAATATTTGTTCTCTGTTAAACATGTCAAGGAGTATGG |
| | TCAGCTTATCCACATTAAGCCTGTGTGTCCCACGTTGGAGTAAATGTTAAGT |
| | AGCTCACTACAATAAACTAGATTCTTCTGCCCTCTCTTGTTTAAATGATCAT |
| | GTTCCCTGGAGGTGGAAATAGATCTTTAAAAAGATATTCTGTAGTTGTTTGT |
| | TCTCAGTGTAAAAAAATGAGAATAATTTGATAAGAGTGTAGGTTGTCTTATA |
| | TAAAAAGTGGTTCCATTTGCATGAATTTTAGAAAAATCATTTTGGAAAAATG |
| | AAGGCTATGTGGTTATACTGAACACATTAAGCAATTTTATTCTTTATTTTAA |
| | ATGAATATTTTATTATCGTTTTCTTCCCTTGCCCTTTGGGTATGGGAGTTAG |
| | CCTTTGTGTTTCTAAATACAACAGGCCGGTTTTTATAAATTAAGGTGTCAAT |
| | ATATTCTTCATTATTTAGTTTTGTGATTGTGGTTAGTTTTCATTTTTCTTAA |
| | GTATCTGCTAGTAGCATCTGTAATTAAGTGAAGTGACCTGTTAACCATTTTC |
| | CTCTTTCTCCTCCTTTCCTCCTCCTTGAAACATATCAGAGCATGTTTGAAAT |
| | TCTTTGGCTTTTATGGTATGCATTTGCTGATATGCATTGACCAGTTACCTTA |
| | CTCACAGATACTTCTTAGGCACTTGATTGTGCCAGGGCCTTGGCTAGATGAT |
| | AAGAATACAGTAGTGAACTTAACAGTTTCCCTGCCCTGGTGAAGCGTATGGT |
| | CTTGTAGGTGAGATAGATATCAGATAATCATGTGAATAAATGTACAATTCCA |
| | GCTGTGATACATGCTGAGGAGGAGGTTTTTGGTGATCCAAGAGCTGATCATG |
| | CAGAGATAGGACTGAGAAAGGAGGGTGGGACGTTGTCACAGCTGATAATGCA |
| | GAGATAGGACTGAGAAAGGAGGGTGGGACATCAGGAAGGTCAGAGAATTCCT |
| | TATGAAAGTGATGCTTGAGTCAAAATATGATGGATGAAGAGAGTTTAAATAG |
| | ATTACATAGAATTTTTAATAATGTCGATTGGTTATATACTGGGCACTGATAG |
| | CTGATTTTTCTTTGGGGAAAGGTATGTCAGCCTAGTCATTCAGATTCCTTTA |
| | TTTTTTTAAATGTTTTTTCATTTTTTGCTTTGCATTGCATTCATTTGCTGAA |
| | GAGCTGGCTTGTACTTTGGCAGGTGTCATACTTGGTTATTCTCCTTAGGATA |
| | TTGGCCCAACAATCTGGGAGTTGTGAAAGGCGCTTCGCTTTTCAGACCTGGG |
| | CGTCTGTATCATGACTATCATAAATTTAGGATTAAGACACCTAGCCTCCTAC |
| | CAGGATGAATGAGGTGTCCATGTGACCTGCTGTGCCCTGGAATTTTATACAT |
| | CTTTCTCTCATAGCACACACCATATTACAATATAATCCTGCCTCATCTAAGC |
| | CAAACTTTCGAGAGAATCATTTACACTCAGTGGCTACTTCAGCTCCCATTCA |
| | CTTATCAACCTGCTGCAATTTTTCACAGCCCCCAAAGGACTGCAGTCTGTGC |
| | CTTCAGGGAGCTGAGGGTCTAGCGGAAGGAAAGAAACCAGCAGTTACAGTAC |
| | AGAGGGGTTTGTGTTGGAAACTCTACAAACACAGGATGCCCTGGTAGCTCAG |
| | AGGAAGTGCATATCGAGCATGGTAGGTAGGTAGTGGGAAGAGCCAAGATGAC |
| | TTCCCAGAGGAGAAAAGCTGGACCTGAGTTTTGGAGTTTCGGTAAAAGTTTG |
| | CTCTAACTAGTCCAAGCTGCTGTCACAAGCTTTTAGAAATGATGTAACCATG |
| | GGGCAGTTGACTGTCGTCATGTTCTTTGCTATTTTCATGACTCTGGATGTGC |
| | TTTTCCTATTCCCTGGATTGCCCTTTCCCTCGATTCCTCTGCAGGACTGGGC |
| | TTTATTAATCTCCATTTCCTTGAGCTTGGCTATAGTAGGTGTTCAATAAACA |
| | TTTGTTTTGTTGTGTGCTTTGTAAATAGGCAATGAAGCTGATTTCACAAGAT |
| | AGGCACAAAAGTTAGTTTCATTACAACACATTACCAACAGCTGTATTTTTAA |
| | CTTTTAACATATCTCATTCTAAATCCTGTGGCAGCACAACCTCCTTCCGTCA |
| | TACCTGGAGATAAATTTTCTTTCAAAATCTAATATGCACTGTATTTATAGAA |
| | TATGAAACATACCGACCATGTTTTGCAAAAATGGGAAAGGCATAACTTAGCT |
| | TTGGGGCATGTAAGTAACAACTCCTGATAGGAGAAGAAATGTATTCAGAAAG |
| | CTCAAATTAGAAATAAAATGGGAGACTCTA (SEQ ID NO: 205) |
| | >NP_001101.1 disintegrin and metalloproteinase |
| | domain-containing protein 10 isoform 1 preproprotein |
| | [Homo sapiens] |
| | MVLLRVLILLLSWAAGMGGQYGNPLNKYIRHYEGLSYNVDSLHQKHQRAKRA |
| | VSHEDQFLRLDFHAHGRHFNLRMKRDTSLFSDEFKVETSNKVLDYDTSHIYT |
| | GHIYGEEGSFSHGSVIDGRFEGFIQTRGGTFYVEPAERYIKDRTLPFHSVIY |
| | HEDDINYPHKYGPQGGCADHSVFERMRKYQMTGVEEVTQIPQEEHAANGPEL |
| | LRKKRTTSAEKNTCQLYIQTDHLFFKYYGTREAVIAQISSHVKAIDTIYQTT |
| | DFSGIRNISFMVKRIRINTTADEKDPTNPFRFPNIGVEKFLELNSEQNHDDY |
| | CLAYVFTDRDFDDGVLGLAWVGAPSGSSGGICEKSKLYSDGKKKSLNTGIIT |
| | VQNYGSHVPPKVSHITFAHEVGHNFGSPHDSGTECTPGESKNLGQKENGNYI |
| | MYARATSGDKLNNNKFSLCSIRNISQVLEKKRNNCFVESGQPICGNGMVEQG |
| | EECDCGYSDQCKDECCFDANQPEGRKCKLKPGKQCSPSQGPCCTAQCAFKSK |
| | SEKCRDDSDCAREGICNGFTALCPASDPKPNFTDCNRHTQVCINGQCAGSIC |
| | EKYGLEECTCASSDGKDDKELCHVCCMKKMDPSTCASTGSVQWSRHFSGRTI |
| | TLQPGSPCNDFRGYCDVFMRCRLVDADGPLARLKKAIFSPELYENIAEWIVA |
| | HWWAVLLMGIALIMLMAGFIKICSVHTPSSNPKLPPPKPLPGTLKRRRPPQP |
| | IQQPQRQRPRESYQMGHMRR (SEQ ID NO: 206) |
| Transmembrane | >NM_001769.4 Homo sapiens CD9 molecule (CD9), |
| domain 2 or | transcript variant 1, mRNA |
| transmembrane | AGCCGCCTGCATCTGTATCCAGCGCCAGGTCCCGCCAGTCCCAGCTGCGCGC |
| domain 3 from | GCCCCCCAGTCCCGCACCCGTTCGGCCCAGGCTAAGTTAGCCCTCACCATGC |
| Human CD9 | CGGTCAAAGGAGGCACCAAGTGCATCAAATACCTGCTGTTCGGATTTAACTT |
| | CATCTTCTGGCTTGCCGGGATTGCTGTCCTTGCCATTGGACTATGGCTCCGA |
| | TTCGACTCTCAGACCAAGAGCATCTTCGAGCAAGAAACTAATAATAATAATT |
| | CCAGCTTCTACACAGGAGTCTATATTCTGATCGGAGCCGGCGCCCTCATGAT |
| | GCTGGTGGGCTTCCTGGGCTGCTGCGGGGCTGTGCAGGAGTCCCAGTGCATG |
| | CTGGGACTGTTCTTCGGCTTCCTCTTGGTGATATTCGCCATTGAAATAGCTG |
| | CGGCCATCTGGGGATATTCCCACAAGGATGAGGTGATTAAGGAAGTCCAGGA |
| | GTTTTACAAGGACACCTACAACAAGCTGAAAACCAAGGATGAGCCCCAGCGG |
| | GAAACGCTGAAAGCCATCCACTATGCGTTGAACTGCTGTGGTTTGGCTGGGG |
| | GCGTGGAACAGTTTATCTCAGACATCTGCCCCAAGAAGGACGTACTCGAAAC |
| | CTTCACCGTGAAGTCCTGTCCTGATGCCATCAAAGAGGTCTTCGACAATAAA |
| | TTCCACATCATCGGCGCAGTGGGCATCGGCATTGCCGTGGTCATGATATTTG |
| | GCATGATCTTCAGTATGATCTTGTGCTGTGCTATCCGCAGGAACCGCGAGAT |
| | GGTCTAGAGTCAGCTTACATCCCTGAGCAGGAAAGTTTACCCATGAAGATTG |
| | GTGGGATTTTTTGTTTGTTTGTTTTGTTTTGTTTGTTGTTTGTTGTTTGTTT |
| | TTTTGCCACTAATTTTAGTATTCATTCTGCATTGCTAGATAAAAGCTGAAGT |
| | TACTTTATGTTTGTCTTTTAATGCTTCATTCAATATTGACATTTGTAGTTGA |
| | GCGGGGGGTTTGGTTTGCTTTGGTTTATATTTTTTCAGTTGTTTGTTTTTGC |
| | TTGTTATATTAAGCAGAAATCCTGCAATGAAAGGTACTATATTTGCTAGACT |
| | CTAGACAAGATATTGTACATAAAAGAATTTTTTTGTCTTTAAATAGATACAA |
| | ATGTCTATCAACTTTAATCAAGTTGTAACTTATATTGAAGACAATTTGATAC |
| | ATAATAAAAAATTATGACAATGTCCTGGA (SEQ ID NO: 207) |
| | >NP_001760.1 CD9 antigen isoform 1 [Homo sapiens] |
| | MPVKGGTKCIKYLLFGFNFIFWLAGIAVLAIGLWLRFDSQTKSIFEQETNNN |
| | NSSFYTGVYILIGAGALMMLVGFLGCCGAVQESQCMLGLFFGFLLVIFAIEI |
| | AAAIWGYSHKDEVIKEVQEFYKDTYNKLKTKDEPQRETLKAIHYALNCCGLA |
| | GGVEQFISDICPKKDVLETFTVKSCPDAIKEVFDNKFHIIGAVGIGIAVVMI |
| | FGMIFSMILCCAIRRNREMV (SEQ ID NO: 208) |
| Human CD298 | >NM_001679.4 Homo sapiens ATPase Na+/K+ transporting |
| | subunit beta 3 (ATP1B3), mRNA |
| | AGTCGGCTCGAGTACTCCCCGTAACGAGGAGGTGTTCTCGGCCGTCCCACCC |
| | TTCACTGCCGTCTCCGGGCTGCGCCGCCGGAGCCGGGACGCGCCTCCGCAGC |
| | CCTCGCCGCCTCCATCCCCGCGGCCGCAGCTCCTCTCGCCGTCCGCGCGCAC |
| | ACCATGACGAAGAACGAGAAGAAGTCCCTCAACCAGAGCCTGGCCGAGTGGA |
| | AGCTCTTCATCTACAACCCGACCACCGGAGAATTCCTGGGGCGCACCGCCAA |
| | GAGCTGGGGTTTGATCTTGCTCTTCTACCTAGTTTTTTATGGGTTCCTGGCT |
| | GCACTCTTCTCATTCACGATGTGGGTTATGCTTCAGACTCTCAACGATGAGG |
| | TTCCAAAATACCGTGACCAGATTCCTAGCCCAGGACTCATGGTTTTTCCAAA |
| | ACCAGTGACCGCATTGGAATATACATTCAGTAGGTCTGATCCAACTTCGTAT |
| | GCAGGGTACATTGAAGACCTTAAGAAGTTTCTAAAACCATATACTTTAGAAG |
| | AACAGAAGAACCTCACAGTCTGTCCTGATGGAGCACTTTTTGAACAGAAGGG |
| | TCCAGTTTATGTTGCATGTCAGTTTCCTATTTCATTACTTCAAGCATGCAGT |
| | GGTATGAATGATCCTGATTTTGGCTATTCTCAAGGAAACCCTTGTATTCTTG |
| | TGAAAATGAACAGAATAATTGGATTAAAGCCTGAAGGAGTGCCAAGGATAGA |
| | TTGTGTTTCAAAGAATGAAGATATACCAAATGTAGCAGTTTATCCTCATAAT |
| | GGAATGATAGACTTAAAATATTTCCCATATTATGGGAAAAAACTGCATGTTG |
| | GGTATCTACAGCCATTGGTTGCTGTTCAGGTCAGCTTTGCTCCTAACAACAC |
| | TGGGAAAGAAGTAACAGTTGAGTGCAAGATTGATGGATCAGCCAACCTAAAA |
| | AGTCAGGATGATCGTGACAAGTTTTTGGGACGAGTTATGTTCAAAATCACAG |
| | CACGTGCATAGTATGAGTAGGATATCTCCACAGAGTAAATGTTGTGTTGTCT |
| | GTCTTCATTTTGTAACAGCTGGACCTTCCATTCTAGAATTATGAGACCACCT |
| | TGGAGAAAGGTGTGTGGTACATGACATTGGGTTACATCATAACGTGCTTCCA |
| | GATCATAGTGTTCAGTGTCCTCTGAAGTAACTGCCTGTTGCCTCTGCTGCCC |
| | TTTGAACCAGTGTACAGTCGCCAGATAGGGACCGGTGAACACCTGATTCCAA |
| | ACATGTAGGATGGGGGTCTTGTCCTCTTTTTATGTGGTTTAATTGCCAAGTG |
| | TCTAAAGCTTAATATGCCGTGCTATGTAAATATTTTATGGATATAACAACTG |
| | TCATATTTTGATGTCAACAGAGTTTTAGGGATAAAATGGTACCCGGCCAACA |
| | TCAAGTGACTTTATAGCTGCAAGAAATGTGGTATGTGGAGAAGTTCTGTATG |
| | TGAGGAAGGAAAAAAAGAAAATAAAAGTGTGTTTGAAAAATATTATCTTGGG |
| | TTCTTTGTAAAATTTATTTTTTACATGCTGAATTAGCCTCGATCTTTTTGAT |
| | TAAGAGCACAAACTTTTTTTTGTAAAACATGTAAAAAAAAAAACTGGGATTA |
| | ATTTTTAGTGTTGGAACTGCCTCTTATTTTAGGCTGTAGATAAAATAGCATT |
| | TTTAGGTTAGCCAGTGTGACTATGCACCTAATTTTTTATGAGATTAAATTCA |
| | TAAGACTTAATTTGTACAATAGTTTGTGAAATATCTTGTTACTGCTTTTATT |
| | TAGCAGACTGTGGACTGTAATAAAGTATATAAATTGTGAAATATAAAAACTT |
| | GGAACTTATTCAAAGCTTCAAAGCAAA (SEQ ID NO: 209) |
| | >NP_001670.1 sodium/potassium-transporting ATPase |
| | subunit beta-3 sapiens |
| | MTKNEKKSLNQSLAEWKLFIYNPTTGEFLGRTAKSWGLILLFYLVFYGFLAA |
| | LFSFTMWVMLQTLNDEVPKYRDQIPSPGLMVFPKPVTALEYTFSRSDPTSYA |
| | GYIEDLKKFLKPYTLEEQKNLTVCPDGALFEQKGPVYVACQFPISLLQACSG |
| | MNDPDFGYSQGNPCILVKMNRIIGLKPEGVPRIDCVSKNEDIPNVAVYPHNG |
| | MIDLKYFPYYGKKLHVGYLQPLVAVQVSFAPNNTGKEVTVECKIDGSANLKS |
| | QDDRDKFLGRVMFKITARA (SEQ ID NO: 210) |
| Lipid affinity tag | >NM_004985.5 Homo sapiens KRAS proto-oncogene, GTPase |
| modified from | (KRAS), transcript variant b, mRNA |
| Human KRAS | CTAGGCGGCGGCCGCGGCGGCGGAGGCAGCAGCGGCGGCGGCAGTGGCGGCG |
| | GCGAAGGTGGCGGCGGCTCGGCCAGTACTCCCGGCCCCCGCCATTTCGGACT |
| | GGGAGCGAGCGCGGCGCAGGCACTGAAGGCGGCGGCGGGGCCAGAGGCTCAG |
| | CGGCTCCCAGGTGCGGGAGAGAGGCCTGCTGAAAATGACTGAATATAAACTT |
| | GTGGTAGTTGGAGCTGGTGGCGTAGGCAAGAGTGCCTTGACGATACAGCTAA |
| | TTCAGAATCATTTTGTGGACGAATATGATCCAACAATAGAGGATTCCTACAG |
| | GAAGCAAGTAGTAATTGATGGAGAAACCTGTCTCTTGGATATTCTCGACACA |
| | GCAGGTCAAGAGGAGTACAGTGCAATGAGGGACCAGTACATGAGGACTGGGG |
| | AGGGCTTTCTTTGTGTATTTGCCATAAATAATACTAAATCATTTGAAGATAT |
| | TCACCATTATAGAGAACAAATTAAAAGAGTTAAGGACTCTGAAGATGTACCT |
| | ATGGTCCTAGTAGGAAATAAATGTGATTTGCCTTCTAGAACAGTAGACACAA |
| | AACAGGCTCAGGACTTAGCAAGAAGTTATGGAATTCCTTTTATTGAAACATC |
| | AGCAAAGACAAGACAGGGTGTTGATGATGCCTTCTATACATTAGTTCGAGAA |
| | ATTCGAAAACATAAAGAAAAGATGAGCAAAGATGGTAAAAAGAAGAAAAAGA |
| | AGTCAAAGACAAAGTGTGTAATTATGTAAATACAATTTGTACTTTTTTCTTA |
| | AGGCATACTAGTACAAGTGGTAATTTTTGTACATTACACTAAATTATTAGCA |
| | TTTGTTTTAGCATTACCTAATTTTTTTCCTGCTCCATGCAGACTGTTAGCTT |
| | TTACCTTAAATGCTTATTTTAAAATGACAGTGGAAGTTTTTTTTTCCTCTAA |
| | GTGCCAGTATTCCCAGAGTTTTGGTTTTTGAACTAGCAATGCCTGTGAAAAA |
| | GAAACTGAATACCTAAGATTTCTGTCTTGGGGCTTTTGGTGCATGCAGTTGA |
| | TTACTTCTTATTTTTCTTACCAATTGTGAATGTTGGTGTGAAACAAATTAAT |
| | GAAGCTTTTGAATCATCCCTATTCTGTGTTTTATCTAGTCACATAAATGGAT |
| | TAATTACTAATTTCAGTTGAGACCTTCTAATTGGTTTTTACTGAAACATTGA |
| | GGGAACACAAATTTATGGGCTTCCTGATGATGATTCTTCTAGGCATCATGTC |
| | CTATAGTTTGTCATCCCTGATGAATGTAAAGTTACACTGTTCACAAAGGTTT |
| | TGTCTCCTTTCCACTGCTATTAGTCATGGTCACTCTCCCCAAAATATTATAT |
| | TTTTTCTATAAAAAGAAAAAAATGGAAAAAAATTACAAGGCAATGGAAACTA |
| | TTATAAGGCCATTTCCTTTTCACATTAGATAAATTACTATAAAGACTCCTAA |
| | TAGCTTTTCCTGTTAAGGCAGACCCAGTATGAAATGGGGATTATTATAGCAA |
| | CCATTTTGGGGCTATATTTACATGCTACTAAATTTTTATAATAATTGAAAAG |
| | ATTTTAACAAGTATAAAAAATTCTCATAGGAATTAAATGTAGTCTCCCTGTG |
| | TCAGACTGCTCTTTCATAGTATAACTTTAAATCTTTTCTTCAACTTGAGTCT |
| | TTGAAGATAGTTTTATTCTGCTTGTGACATTAAAAGATTATTTGGGCCAGT |
| | TATAGCTTATTAGGTGTTGAAGAGACCAAGGTTGCAAGGCCAGGCCCTGTGT |
| | GAACCTTTGAGCTTTCATAGAGAGTTTCACAGCATGGACTGTGTCCCCACGG |
| | TCATCCAGTGTTGTCATGCATTGGTTAGTCAAAATGGGGAGGGACTAGGGCA |
| | GTTTGGATAGCTCAACAAGATACAATCTCACTCTGTGGTGGTCCTGCTGACA |
| | AATCAAGAGCATTGCTTTTGTTTCTTAAGAAAACAAACTCTTTTTTAAAAAT |
| | TACTTTTAAATATTAACTCAAAAGTTGAGATTTTGGGGTGGTGGTGTGCCAA |
| | GACATTAATTTTTTTTTTAAACAATGAAGTGAAAAAGTTTTACAATCTCTAG |
| | GTTTGGCTAGTTCTCTTAACACTGGTTAAATTAACATTGCATAAACACTTTT |
| | CAAGTCTGATCCATATTTAATAATGCTTTAAAATAAAAATAAAAACAATCCT |
| | TTTGATAAATTTAAAATGTTACTTATTTTAAAATAAATGAAGTGAGATGGCA |
| | TGGTGAGGTGAAAGTATCACTGGACTAGGAAGAAGGTGACTTAGGTTCTAGA |
| | TAGGTGTCTTTTAGGACTCTGATTTTGAGGACATCACTTACTATCCATTTCT |
| | TCATGTTAAAAGAAGTCATCTCAAACTCTTAGTTTTTTTTTTTTACAACTAT |
| | GTAATTTATATTCCATTTACATAAGGATACACTTATTTGTCAAGCTCAGCAC |
| | AATCTGTAAATTTTTAACCTATGTTACACCATCTTCAGTGCCAGTCTTGGGC |
| | AAAATTGTGCAAGAGGTGAAGTTTATATTTGAATATCCATTCTCGTTTTAGG |
| | ACTCTTCTTCCATATTAGTGTCATCTTGCCTCCCTACCTTCCACATGCCCCA |
| | TGACTTGATGCAGTTTTAATACTTGTAATTCCCCTAACCATAAGATTTACTG |
| | CTGCTGTGGATATCTCCATGAAGTTTTCCCACTGAGTCACATCAGAAATGCC |
| | CTACATCTTATTTCCTCAGGGCTCAAGAGAATCTGACAGATACCATAAAGGG |
| | ATTTGACCTAATCACTAATTTTCAGGTGGTGGCTGATGCTTTGAACATCTCT |
| | TTGCTGCCCAATCCATTAGCGACAGTAGGATTTTTCAAACCTGGTATGAATA |
| | GACAGAACCCTATCCAGTGGAAGGAGAATTTAATAAAGATAGTGCTGAAAGA |
| | ATTCCTTAGGTAATCTATAACTAGGACTACTCCTGGTAACAGTAATACATTC |
| | CATTGTTTTAGTAACCAGAAATCTTCATGCAATGAAAAATACTTTAATTCAT |
| | GAAGCTTACTTTTTTTTTTTGGTGTCAGAGTCTCGCTCTTGTCACCCAGGCT |
| | GGAATGCAGTGGCGCCATCTCAGCTCACTGCAACCTCCATCTCCCAGGTTCA |
| | AGCGATTCTCGTGCCTCGGCCTCCTGAGTAGCTGGGATTACAGGCGTGTGCC |
| | ACTACACTCAACTAATTTTTGTATTTTTAGGAGAGACGGGGTTTCACCCTGT |
| | TGGCCAGGCTGGTCTCGAACTCCTGACCTCAAGTGATTCACCCACCTTGGCC |
| | TCATAAACCTGTTTTGCAGAACTCATTTATTCAGCAAATATTTATTGAGTGC |
| | CTACCAGATGCCAGTCACCACACAAGGCACTGGGTATATGGTATCCCCAAAC |
| | AAGAGACATAATCCCGGTCCTTAGGTAGTGCTAGTGTGGTCTGTAATATCTT |
| | ACTAAGGCCTTTGGTATACGACCCAGAGATAACACGATGCGTATTTTAGTTT |
| | TGCAAAGAAGGGGTTTGGTCTCTGTGCCAGCTCTATAATTGTTTTGCTACGA |
| | TTCCACTGAAACTCTTCGATCAAGCTACTTTATGTAAATCACTTCATTGTTT |
| | TAAAGGAATAAACTTGATTATATTGTTTTTTTATTTGGCATAACTGTGATTC |
| | TTTTAGGACAATTACTGTACACATTAAGGTGTATGTCAGATATTCATATTGA |
| | CCCAAATGTGTAATATTCCAGTTTTCTCTGCATAAGTAATTAAAATATACTT |
| | AAAAATTAATAGTTTTATCTGGGTACAAATAAACAGGTGCCTGAACTAGTTC |
| | ACAGACAAGGAAACTTCTATGTAAAAATCACTATGATTTCTGAATTGCTATG |
| | TGAAACTACAGATCTTTGGAACACTGTTTAGGTAGGGTGTTAAGACTTACAC |
| | AGTACCTCGTTTCTACACAGAGAAAGAAATGGCCATACTTCAGGAACTGCAG |
| | TGCTTATGAGGGGATATTTAGGCCTCTTGAATTTTTGATGTAGATGGGCATT |
| | TTTTTAAGGTAGTGGTTAATTACCTTTATGTGAACTTTGAATGGTTTAACAA |
| | AAGATTTGTTTTTGTAGAGATTTTAAAGGGGGAGAATTCTAGAAATAAATGT |
| | TACCTAATTATTACAGCCTTAAAGACAAAAATCCTTGTTGAAGTTTTTTTAA |
| | AAAAAGCTAAATTACATAGACTTAGGCATTAACATGTTTGTGGAAGAATATA |
| | GCAGACGTATATTGTATCATTTGAGTGAATGTTCCCAAGTAGGCATTCTAGG |
| | CTCTATTTAACTGAGTCACACTGCATAGGAATTTAGAACCTAACTTTTATAG |
| | GTTATCAAAACTGTTGTCACCATTGCACAATTTTGTCCTAATATATACATAG |
| | AAACTTTGTGGGGCATGTTAAGTTACAGTTTGCACAAGTTCATCTCATTTGT |
| | ATTCCATTGATTTTTTTTTTCTTCTAAACATTTTTTCTTCAAACAGTATATA |
| | ACTTTTTTTAGGGGATTTTTTTTTAGACAGCAAAAACTATCTGAAGATTTCC |
| | ATTTGTCAAAAAGTAATGATTTCTTGATAATTGTGTAGTAATGTTTTTTAGA |
| | ACCCAGCAGTTACCTTAAAGCTGAATTTATATTTAGTAACTTCTGTGTTAAT |
| | ACTGGATAGCATGAATTCTGCATTGAGAAACTGAATAGCTGTCATAAAATGA |
| | AACTTTCTTTCTAAAGAAAGATACTCACATGAGTTCTTGAAGAATAGTCATA |
| | ACTAGATTAAGATCTGTGTTTTAGTTTAATAGTTTGAAGTGCCTGTTTGGGA |
| | TAATGATAGGTAATTTAGATGAATTTAGGGGAAAAAAAAGTTATCTGCAGAT |
| | ATGTTGAGGGCCCATCTCTCCCCCCACACCCCCACAGAGCTAACTGGGTTAC |
| | AGTGTTTTATCCGAAAGTTTCCAATTCCACTGTCTTGTGTTTTCATGTTGAA |
| | AATACTTTTGCATTTTTCCTTTGAGTGCCAATTTCTTACTAGTACTATTTCT |
| | TAATGTAACATGTTTACCTGGAATGTATTTTAACTATTTTTGTATAGTGTAA |
| | ACTGAAACATGCACATTTTGTACATTGTGCTTTCTTTTGTGGGACATATGCA |
| | GTGTGATCCAGTTGTTTTCCATCATTTGGTTGCGCTGACCTAGGAATGTTGG |
| | TCATATCAAACATTAAAAATGACCACTCTTTTAATTGAAATTAACTTTTAAA |
| | TGTTTATAGGAGTATGTGCTGTGAAGTGATCTAAAATTTGTAATATTTTTGT |
| | CATGAACTGTACTACTCCTAATTATTGTAATGTAATAAAAATAGTTACAGTG |
| | AC (SEQ ID NO: 211) |
| | >NP_004976.2 GTPase KRas isoform b [Homo sapiens] |
| | MTEYKLVVVGAGGVGKSALTIQLIQNHFVDEYDPTIEDSYRKQVVIDGETCL |
| | LDILDTAGQEEYSAMRDQYMRTGEGFLCVFAINNTKSFEDIHHYREQIKRVK |
| | DSEDVPMVLVGNKCDLPSRTVDTKQAQDLARSYGIFFIETSAKTRQGVDDAF |
| | YTLVREIRKHKEKMSKDGKKKKKKSKTKCVIM (SEQ ID NO: 212) |
| | >Lipid affinity tag nucleotide sequence |
| | AAAAAGAAGAAAAAGAAGAAGAAGACAAAGTGTGTAATTATG (SEQ ID NO: |
| | 213) |
| | >Lipid affinity tag peptide sequence |
| | KKKKKKKKTKCVIM (SEQ ID NO: 214) |
| Myr/Palm tag | >NM_002356.7 Homo sapiens myristoylated alanine rich |
| modified from | protein kinase C substrate (MARCKS), mRNA |
| Human MARCKS | GCACTTGGGCGTTGGACCCCGCATCTTATTAGCAACCAGGGAGATTTCTCCA |
| | TTTTCCTCTTGTCTACAGTGCGGCTACAAATCTGGGATTTTTTTATTACTTC |
| | TTTTTTTTTCGAACTACACTTGGGCTCCTTTTTTTGTGCTCGACTTTTCCAC |
| | CCTTTTTCCCTCCCTCCTGTGCTGCTGCTTTTTGATCTCTTCGACTAAAATT |
| | TTTTTATCCGGAGTGTATTTAATCGGTTCTGTTCTGTCCTCTCCACCACCCC |
| | CACCCCCCTCCCTCCGGTGTGTGTGCCGCTGCCGCTGTTGCCGCCGCCGCTG |
| | CTGCTGCTGCTCGCCCCGTCGTTACACCAACCCGAGGCTCTTTGTTTCCCCT |
| | CTTGGATCTGTTGAGTTTCTTTGTTGAAGAAGCCAGCATGGGTGCCCAGTTC |
| | TCCAAGACCGCAGCGAAGGGAGAAGCCGCCGCGGAGAGGCCTGGGGAGGCGG |
| | CTGTGGCCTCGTCGCCTTCCAAAGCGAACGGACAGGAGAATGGCCACGTGAA |
| | GGTAAACGGCGACGCTTCGCCCGCGGCCGCCGAGTCGGGCGCCAAGGAGGAG |
| | CTGCAGGCCAACGGCAGCGCCCCGGCCGCCGACAAGGAGGAGCCCGCGGCCG |
| | CCGGGAGCGGGGCGGCGTCGCCCTCCGCGGCCGAGAAAGGTGAGCCGGCCGC |
| | CGCCGCTGCCCCCGAGGCCGGGGCCAGCCCGGTAGAGAAGGAGGCCCCCGCG |
| | GAAGGCGAGGCTGCCGAGCCCGGCTCGCCCACGGCCGCGGAGGGAGAGGCCG |
| | CGTCGGCCGCCTCCTCGACTTCTTCGCCCAAGGCCGAGGACGGGGCCACGCC |
| | CTCGCCCAGCAACGAGACCCCGAAAAAAAAAAAGAAGCGCTTTTCCTTCAAG |
| | AAGTCTTTCAAGCTGAGCGGCTTCTCCTTCAAGAAGAACAAGAAGGAGGCTG |
| | GAGAAGGCGGTGAGGCTGAGGCGCCCGCTGCCGAAGGCGGCAAGGACGAGGC |
| | CGCCGGGGGCGCAGCTGCGGCCGCCGCCGAGGCGGGCGCGGCCTCCGGGGAG |
| | CAGGCAGCGGCGCCGGGCGAGGAGGCGGCAGCGGGCGAGGAGGGGGCGGCGG |
| | GTGGCGACCCGCAGGAGGCCAAGCCCCAGGAGGCCGCTGTCGCGCCAGAGAA |
| | GCCGCCCGCCAGCGACGAGACCAAGGCCGCCGAGGAGCCCAGCAAGGTGGAG |
| | GAGAAAAAGGCCGAGGAGGCCGGGGCCAGCGCCGCCGCCTGCGAGGCCCCCT |
| | CCGCCGCCGGGCCCGGCGCGCCCCCGGAGCAGGAGGCAGCCCCCGCGGAGGA |
| | GCCCGCGGCCGCCGCAGCCTCGTCAGCCTGCGCAGCCCCCTCACAGGAGGCC |
| | CAGCCCGAGTGCAGTCCAGAAGCCCCCCCAGCGGAGGCGGCAGAGTAAAAGA |
| | GCAAGCTTTTGTGAGATAATCGAAGAACTTTTCTCCCCCGTTTGTTTGTTGG |
| | AGTGGTGCCAGGTACTGGTTTTGGAGAACTTGTCTACAACCAGGGATTGATT |
| | TTAAAGATGTCTTTTTTTATTTTACTTTTTTTTAAGCACCAAATTTTGTTGT |
| | TTTTTTTTTTTCTCCCCTCCCCACAGATCCCATCTCAAATCATTCTGTTAAC |
| | CACCATTCCAACAGGTCGAGGAGAGCTTAAACACCTTCTTCCTCTGCCTTGT |
| | TTCTCTTTTATTTTTTATTTTTTCGCATCAGTATTAATGTTTTTGCATACTT |
| | TGCATCTTTATTCAAAAGTGTAAACTTTCTTTGTCAATCTATGGACATGCCC |
| | ATATATGAAGGAGATGGGTGGGTCAAAAAGGGATATCAAATGAAGTGATGGG |
| | GTCACAATGGGGAAATTGAAGTGGTGCATAACATTGCCAAAATAGTGTGCCA |
| | CTAGAAATGGTGTAAAGGCTGTCTTTTTTTTTTTTTTAAAAGAAAAGTTATT |
| | ACCATGTATTTTGTGAGGCAGGTTTACAACACTACAAGTCTTGAGTTAAGAA |
| | GGAAAGAGGAAAAAAGAAAAAACACCAATACCCAGATTTAAAAAAAAAAAAA |
| | CGATCATAGTCTTAGGAGTTCATTTAAACCATAGGAACTTTTCACTTATCTC |
| | ATGTTAGCTGTACCAGTCAGTGATTAAGTAGAACTACAAGTTGTATAGGCTT |
| | TATTGTTTATTGCTGGTTTATGACCTTAATAAAGTGTAATTATGTATTACCA |
| | GCAGGGTGTTTTTAACTGTGACTATTGTATAAAAACAAATCTTGATATCCAG |
| | AAGCACATGAAGTTTGCAACTTTCCACCCTGCCCATTTTTGTAAAACTGCAG |
| | TCATCTTGGACCTTTTAAAACACAAATTTTAAACTCAACCAAGCTGTGATAA |
| | GTGGAATGGTTACTGTTTATACTGTGGTATGTTTTTGATTACAGCAGATAAT |
| | GCTTTCTTTTCCAGTCGTCTTTGAGAATAAAGGAAAAAAAATCTTCAGATGC |
| | AATGGTTTTGTGTAGCATCTTGTCTATCATGTTTTGTAAATACTGGAGAAGC |
| | TTTGACCAATTTGACTTAGAGATGGAATGTAACTTTGCTTACAAAAATTGCT |
| | ATTAAACTCCTGCTTAAGGTGTTCTAATTTTCTGTGAGCACACTAAAAGCGA |
| | AAAATAAATGTGAATAAAATGTACAAATTTGTTGTGTTTTTTTATGTTCTAA |
| | TAATACTGAGACTTCTAGGTCTTAGGTTAATTTTTAGGAAGATCTTGCATGC |
| | CATCAGGAGTAAATTTTATTGTGGTTCTTAATCTGAAGTTTTCAAGCTCTGA |
| | AATTCATAATCCGCAGTGTCAGATTACGTAGAGGAAGATCTTACAACATTTC |
| | CATGTCAAATCTGTTACCATTTATTGGCATTTAGTTTTCATTTAAGAATTGA |
| | ACATAATTATTTTTATTGTAGCTATATAGCATGTCAGATTAAATCATTTACA |
| | ACAAAAGGGGTGTGAACCTAAGACTATTTAAATGTCTTATGAGAAAATTTCA |
| | TAAAGCCATTCTCTTGTCATTCAGGTCCAGAAACAAATTTTAAACTGAGTGA |
| | GAGTCTATAGAATCCATACTGCAGATGGGTCATGAAATGTGACCAAATGTGT |
| | TTCAAAAATTGATGGTGTATTACCTGCTATTGTAATTGCTTAGTGCTTGGCT |
| | AATTTCCAAATTATTGCATAATATGTTCTACCTTAAGAAAACAGGTTTATGT |
| | AACAAAGTAATGGTGTTGAATGGATGATGTCAGTTCATGGGCCTTTAGCATA |
| | GTTTTAAGCATCCTTTTTTTTTTTTTTTTTTGAAAGTGTGTTAGCATCTTGT |
| | TACTCAAAGGATAAGACAGACAATAATACTTCACTGAATCTTAATAATCTTT |
| | ACTAGTTTACCTCCTCTGCTCTTTGCCACCCGATAACTGGATATCTTTTCCT |
| | TCAAAGGACCCTAAACTGATTGAAATTTAAGATATGTATCAAAAACATTATT |
| | TCATTTAATGCACATCTGTTTTGCTGTTTTTGAGCAGTGTGCAGTTTAGGGT |
| | TCATGATAAATCATTGAACCACATGTGTAACAACTGAATGCCAAATCTTAAA |
| | CTCATTAGAAAAATAACAAATTAGGTTTTGACACGCATTCTTAATTGGAATA |
| | ATGGATCAAAAATAGTGGTTCATGACCTTACCAAACACCCTTGCTACTAATA |
| | AAATCAAATAACACTTAGAAGGGTATGTATTTTTAGTTAGGGTTTCTTGATC |
| | TTGGAGGATGTTTGAAAGTTAAAAATTGAATTTGGTAACCAAAGGACTGATT |
| | TATGGGTCTTTCCTATCTTAACCAACGTTTTCTTAGTTACCTAGATGGCCAA |
| | GTACAGTGCCTGGTATGTAGTAAGACTCAGTAAAAAAGTGGATTTTTAAAAA |
| | TAACTCCCAAAGTGAATAGTCAAAAATCCTGTTAGCAAACTGTTATATATTG |
| | CTAAGTTTGTTCTTTTAACAGCTGGAATTTATTAAGATGCATTATTTTGATT |
| | TTATTCACTGCCTAAAACACTTTGGGTGGTATTGATGGAGTTGGTGGATTTT |
| | CCTCCAAGTGATTAAATGAAATTTGACGTATCTTTTCATCCAAAGTTTTGTA |
| | CATCATGTTTTCTAACGGAAAAAAATGTTAATATGGCTTTTTTGTATTACTA |
| | AAAATAGCTTTGAGATTAAGGAAAAATAAATAACTCTTGTACAGTTCAGTAT |
| | TGTCTATTAAATCTGTATTGGCAGTATGTATAATGGCATTTGCTGTGGTTAC |
| | AAAATACTTCCTCTGGGTTATAATAATCATTTGATCCAATTCCTATTGCTTG |
| | TAAAATAAAGTTTTACCAGTTGATATAATCAA (SEQ ID NO: 215) |
| | >NP_002347.5 myristoylated alanine-rich C-kinase |
| | substrate [Homo sapiens] |
| | MGAQFSKTAAKGEAAAERPGEAAVASSPSKANGQENGHVKVNGDASPAAAES |
| | GAKEELQANGSAPAADKEEPAAAGSGAASPSAAEKGEPAAAAAPEAGASPVE |
| | KEAPAEGEAAEPGSPTAAEGEAASAASSTSSPKAEDGATPSPSNETPKKKKK |
| | RFSFKKSFKLSGFSFKKNKKEAGEGGEAEAPAAEGGKDEAAGGAAAAAAEAG |
| | AASGEQAAAPGEEAAAGEEGAAGGDPQEAKPQEAAVAPEKPPASDETKAAEE |
| | PSKVEEKKAEEAGASAAACEAPSAAGPGAPPEQEAAPAEEPAAAAASSACAA |
| | PSQEAQPECSPEAPPAEAAE (SEQ ID NO: 216) |
| | >Myr/Palm tag modified from Human MARCKS, nucleotide |
| | sequence |
| | ATGGGTTGCTGTTTCTCCAAGACC (SEQ ID NO: 217) |
| | >Myr/Palm tag modified from Human MARCKS, peptide |
| | sequence |
| | MGCCFSKT (SEQ ID NO: 218) |

[0127] In some embodiments of any of the aspects provided herein, the fusion polypeptide further comprises a peptide linker. The linker may be flexible, rigid, or cleavable. Further, the linker can be linked directly or via another linker (e.g., a peptide of one, two, three, four, five, six, seven, eight, nine, ten or more amino acids) to the fusion polypeptides described herein. Linkers can be configured according to a specific need, e.g., based on at least one of the following characteristics. In some embodiments of any of the aspects, linkers can be configured to have a sufficient length and flexibility such that it can allow for a cleavage at a target site. In some embodiments of any of the aspects, linkers can be configured to allow multimerization of the fusion polypeptides provided herein. In some embodiments of any of the aspects, linkers can be configured to facilitate expression and purification of the fusion proteins or engineered extracellular vesicles provided herein.

[0128] In some embodiments of any of the aspects, a linker can be configured to have any length in a form of a peptide, peptidomimetic, an aptamer, a protein, a nucleic acid (e.g., DNA or RNA), or any combinations thereof. For example, in one embodiment, the linker may be a polypeptide linker such as Gly-Ser-Ser-Gly or a variation thereof as known by one of ordinary skill in the art. In another embodiment the linker may be a protein sequence for a self-cleavable peptide. For example, 2A sequences such as P2A, E2A, F2A, and T2A code for self-cleavable peptides by inducing ribosomal slippage on the miRNA at the 2A site which prevents peptide bond formation. The slippage will result in two separate peptides after translation. This allows the expression of two separate proteins from one promoter region. Any combination of the proteins described herein may be expressed with a self-cleavable peptide as known by one of ordinary skill in the art.

[0129] In some embodiments of any of the aspects, the polypeptide linker is a non-cleavable linker. In some embodiments of any of the aspects, a linker can be a chemical linker of any length.

[0130] In some embodiments of any of the aspects, the linker is an Fc linker. An exemplary nucleic acid sequence encoding an Fc polypeptide is:

>KY053479.1 Synthetic construct Fc-adiponectin
gene, complete cds
(SEQ ID NO: 219)
ATGTACAGGATGCAACTCCTGTCTTGCATTGCACTAAGTCTTGCACTTG
TCACGAACTCGATATCGGCCATGGTTAGATCTGACAAAACTCACACATG
CCCACCGTGCCCAGCACCTGAACTCCTGGGGGGACCGTCAGTCTTCCTC
TTCCCCCCAAAACCCAAGGACACCCTCATGATCTCCCGGACCCCTGAGG
TCACATGCGTGGTGGTGGACGTGAGCCACGAAGACCCTGAGGTCAAGTT
CAACTGGTACGTGGACGGCGTGGAGGTGCATAATGCCAAGACAAAGCCG
CGGGAGGAGCAGTACAACAGCACGTACCGTGTGGTCAGCGTCCTCACCG
TCCTGCACCAGGACTGGCTGAATGGCAAGGAGTACAAGTGCAAGGTCTC
CAACAAAGCCCTCCCAGCCCCCATCGAGAAAACCATCTCCAAAGCCAAA
GGGCAGCCCCGAGAACCACAGGTGTACACCCTGCCCCCATCCCGGGAGG
AGATGACCAAGAACCAGGTCAGCCTGACCTGCCTGGTCAAAGGCTTCTA
TCCCAGCGACATCGCCGTGGAGTGGGAGAGCAATGGGCAGCCGGAGAAC
AACTACAAGACCACGCCTCCCGTGCTGGACTCCGACGGCTCCTTCTTCC
TCTACAGCAAGCTCACCGTGGACAAGAGCAGGTGGCAGCAGGGGAACGT
CTTCTCATGCTCCGTGATGCACGAGGCTCTGCACAACCACTACACGCAG
AAGAGCCTCTCCCTGTCTCCGGGTAAAGCCAGCGGAAGTGGCGGAGGAG
GCGGTCCTGGAGAAGGTGCCTATGTATACCGCTCAGCATTCAGTGTGGG
ATTGGAGACTTACGTTACTATCCCCAACATGCCCATTCGCTTTACCAAG
ATCTTCTACAATCAGCAAAACCACTATGATGGCTCCACTGGTAAATTCC
ACTGCAACATTCCTGGGCTGTACTACTTTGCCTACCACATCACAGTCTA
TATGAAGGATGTGAAGGTCAGCCTCTTCAAGAAGGACAAGGCTATGCTC
TTCACCTATGATCAGTACCAGGAAAATAATGTGGACCAGGCCTCCGGCT
CTGTGCTCCTGCATCTGGAGGTGGGCGACCAAGTCTGGCTCCAGGTGTA
TGGGGAAGGAGAGCGTAATGGACTCTATGCTGATAATGACAATGACTCC
ACCTTCACAGGCTTTCTTCTCTACCATGACACCAACTCTAGAAAGCTTC
CTGGAGAAGGTGCCTATGTATACCGCTCAGCATTCAGTGTGGGATTGGA
GACTTACGTTACTATCCCCAACATGCCCATTCGCTTTACCAAGATCTTC
TACAATCAGCAAAACCACTATGATGGCTCCACTGGTAAATTCCACTGCA
ACATTCCTGGGCTGTACTACTTTGCCTACCACATCACAGTCTATATGAA
GGATGTGAAGGTCAGCCTCTTCAAGAAGGACAAGGCTATGCTCTTCACC
TATGATCAGTACCAGGAAAATAATGTGGACCAGGCCTCCGGCTCTGTGC
TCCTGCATCTGGAGGTGGGCGACCAAGTCTGGCTCCAGGTGTATGGGGA
AGGAGAGCGTAATGGACTCTATGCTGATAATGACAATGACTCCACCTTC
ACAGGCTTTCTTCTCTACCATGACACCAACACTAGTCCTGGAGAAGGTG
CCTATGTATACCGCTCAGCATTCAGTGTGGGATTGGAGACTTACGTTAC
TATCCCCAACATGCCCATTCGCTTTACCAAGATCTTCTACAATCAGCAA
AACCACTATGATGGCTCCACTGGTAAATTCCACTGCAACATTCCTGGGC
TGTACTACTTTGCCTACCACATCACAGTCTATATGAAGGATGTGAAGGT
CAGCCTCTTCAAGAAGGACAAGGCTATGCTCTTCACCTATGATCAGTAC
CAGGAAAATAATGTGGACCAGGCCTCCGGCTCTGTGCTCCTGCATCTGG
AGGTGGGCGACCAAGTCTGGCTCCAGGTGTATGGGGAAGGAGAGCGTAA
TGGACTCTATGCTGATAATGACAATGACTCCACCTTCACAGGCTTTCTT
CTCTACCATGACACCAACTAA.

[0131] The amino acid sequence of the Fc linker is:

>Fc Translation
(SEQ ID NO: 220)
DKTHTCPPCPAPELLGGPSVFLFPPKPKDTLMISRTPEVTCVVVDVSHE
DPEVKFNWYVDGVEVHNAKTKPREEQYNSTYRVVSVLIVLHQDWLNGKE
YKCKVSNKALPAPIEKTISKAKGQPREPQVYTLPPSREEMTKNQVSLTC
LVKGFYPSDIAVEWESNGQPENNYKTTPPVLDSDGSFFLYSKLTVDKSR
WQQGNVFSCSVMHEALHNHYTQKSLSLSPGK.

[0132] In some embodiments of any of the aspects, the linker is a P2A peptide linker. P2A is a self-cleaving peptide sequence allowing for expression of two proteins from one promoter. In some embodiments, the P2A linker is encoded by the nucleic acid sequence: GCTACTAACTTCAGCCTGCTGAAGCAG (SEQ ID NO: 221). The amino acid sequence of P2A is ATNFSLKQAGDVENPGP (SEQ ID NO: 222).

[0133] In some embodiments of any of the aspects, the linker is provides a multimerization (e.g., dimerization) domain wherein one fusion polypeptide may connect with another fusion polypeptide at each fusion polypeptide's respective multimerization domain. Multimerization of multiple fusion polypeptides will provide multiple fusion polypeptides within close proximity to one another to one or more a target receptor on the target cell, wherein the multiple fusion peptides will enhance receptor clustering on the target cell. Clustering receptors on a target cell will result in enhanced signal transduction. Without receptor clustering a signal may be weaker or not occur all together. For example, Fc domain sequences presented herein dimerize resulting in two fusion polypeptides connected by a covalent bond via the two Fc domains on their respective fusion polypeptide. One preferred embodiment of an Fc domain is from IgG4, herein labeled 4Fc. In other embodiments Fc may be from IgG1, herein labeled Fc. In certain embodiments Fc from other immunoglobulin, (e.g., IgG2, IgG3, etc.) may be used.

[0134] Additional non-limiting examples of linkers that can be used and their properties are further described in detail, e.g., in Chen X, Zaro J L, Shen W C. Fusion protein linkers: property, design and functionality. Adv Drug Deliv Rev. 2013; 65(10):1357-1369. doi:10.1016/j.addr.2012.09.039; O'Shea E K, Lumb K J, Kim P S. Peptide ‘Velcro’: design of a heterodimeric coiled coil. Curr Biol. 1993 Oct. 1; 3(10):658-67. doi: 10.1016/0960-9822(93)90063-t. PMID: 15335856; and Müller K M, Arndt K M, Alber T. Protein fusions to coiled-coil domains. Methods Enzymol. 2000; 328:261-82. doi: 10.1016/s0076-6879(00)28402-4. PMID: 11075350, the contents of which are incorporated herein by reference in their entireties.

[0135] The engineered extracellular vesicle compositions provided herein can comprise variations in the configuration of the POI domain, linkers, and/or vesicle targeting domain. The specific combination and localization of these domains can enhance fusion polypeptide anchoring, function, or therapeutic effect, e.g., modulating inflammation.

[0136] Thus, in one aspect, provided herein is an engineered extracellular vesicle comprising: at least one fusion polypeptide comprising: (i) at least one protein of interest (POI) domain or a fragment thereof; and (ii) at least one vesicle targeting domain, wherein the POI domain is in an extracellular position relative to a lipid membrane of the extracellular vesicle.

[0137] In some embodiments, the POI domain or a fragment thereof is a N-terminal domain of the fusion polypeptide. In some embodiments, the vesicle targeting domain or a fragment thereof is a C-terminal domain of the fusion polypeptide.

[0138] In another aspect, provided herein is an engineered extracellular vesicle comprising: at least one fusion polypeptide comprising: (i) at least one protein of interest (POI) domain or a fragment thereof; and (ii) at least one vesicle targeting domain, wherein the POI domain is in an extracellular position relative to a lipid membrane of the extracellular vesicle, and wherein the vesicle targeting domain is a transmembrane domain relative to a lipid membrane of the extracellular vesicle.

[0139] In some embodiments, the POI domain or a fragment thereof is a C-terminal domain of the fusion polypeptide. In some embodiments, the vesicle targeting domain or a fragment thereof is a N-terminal domain of the fusion polypeptide. In some embodiments, the vesicle targeting domain is in a luminal position relative to the lipid membrane of the extracellular vesicle.

[0140] In some embodiments, the linker is in an exterior position relative to the lipid membrane of the extracellular vesicle. In some embodiments, the linker is a transmembrane linker. In some embodiments, the linker is in a luminal position relative to the lipid membrane of the extracellular vesicle.

[0141] The engineered extracellular vesicle compositions provided herein can comprise one or more of the following fusion polypeptide sequences in Table 4.

TABLE 4
Full Length Constructs

| | Nucleic Acid Sequence (SEQ ID NO:) |
|---|---|
| Fusion Polypeptide | Amino Acid Sequence (SEQ ID NO:) |
| hCTLA4-Fc-GPI | >Artificial sequence; hCTLA4-Fc-GPI, DNA |
| | ATGGCTTGCCTTGGATTTCAGCGGCACAAGGCTCAGCTGAACCTGGCTACCAGGACC |
| | TGGCCCTGCACTCTCCTGTTTTTTCTTCTCTTCATCCCTGTCTTCTGCAAAGCAATG |
| | CACGTGGCCCAGCCTGCTGTGGTACTGGCCAGCAGCCGAGGCATCGCCAGCTTTGTG |
| | TGTGAGTATGCATCTCCAGGCAAAGCCACTGAGGTCCGGGTGACAGTGCTTCGGCAG |
| | GCTGACAGCCAGGTGACTGAAGTCTGTGCGGCAACCTACATGATGGGGAATGAGTTG |
| | ACCTTCCTAGATGATTCCATCTGCACGGGCACCTCCAGTGGAAATCAAGTGAACCTC |
| | ACTATCCAAGGACTGAGGGCCATGGACACGGGACTCTACATCTGCAAGGTGGAGCTC |
| | ATGTACCCACCGCCATACTACCTGGGCATAGGCAACGGAACCCAGATTTATGTAATT |
| | GATCCAGAACCGTGCCCAGATTCTGACATCGATGACAAAACTCACACATGCCCACCG |
| | TGCCCAGCACCTGAACTCCTGGGGGGACCGTCAGTCTTCCTCTTCCCCCCAAAACCC |
| | AAGGACACCCTCATGATCTCCCGGACCCCTGAGGTCACATGCGTGGTGGTGGACGTG |
| | AGCCACGAAGACCCTGAGGTCAAGTTCAACTGGTACGTGGACGGCGTGGAGGTGCAT |
| | AATGCCAAGACAAAGCCGCGGGAGGAGCAGTACAACAGCACGTACCGTGTGGTCAGC |
| | GTCCTCACCGTCCTGCACCAGGACTGGCTGAATGGCAAGGAGTACAAGTGCAAGGTC |
| | TCCAACAAAGCCCTCCCAGCCCCCATCGAGAAAACCATCTCCAAAGCCAAAGGGCAG |
| | CCCCGAGAACCACAGGTGTACACCCTGCCCCCATCCCGGGAGGAGATGACCAAGAAC |
| | CAGGTCAGCCTGACCTGCCTGGTCAAAGGCTTCTATCCCAGCGACATCGCCGTGGAG |
| | TGGGAGAGCAATGGGCAGCCGGAGAACAACTACAAGACCACGCCTCCCGTGCTGGAC |
| | TCCGACGGCTCCTTCTTCCTCTACAGCAAGCTCACCGTGGACAAGAGCAGGTGGCAG |
| | CAGGGGAACGTCTTCTCATGCTCCGTGATGCACGAGGCTCTGCACAACCACTACACG |
| | CAGAAGAGCCTCTCCCTGTCTCCGGGTAAAATCGATCCAAATAAAGGAAGTGGAACC |
| | ACTTCAGGTACTACCCGTCTTCTATCTGGGCACACGTGTTTCACGTTGACAGGTTTG |
| | CTTGGGACGCTAGTAACCATGGGCTTGCTGACTTAG |
| | (SEQ ID NO: 223) |
| | > Artificial sequence; hCTLA4-Fc-GPI, Amino Acid |
| | MACLGFQRHKAQLNLATRTWPCTLLFFLLFIPVFCKAMHVAQPAVVLASSRGIASFV |
| | CEYASPGKATEVRVTVLRQADSQVTEVCAATYMMGNELTFLDDSICTGTSSGNQVNL |
| | TIQGLRAMDTGLYICKVELMYPPPYYLGIGNGTQTYVIDPEPCPDSDIDDKIHTCPP |
| | CPAPELLGGPSVFLFPPKPKDTLMISRTPEVTCVVVDVSHEDPEVKFNWYVDGVEVH |
| | NAKTKPREEQYNSTYRVVSVLTVLHQDWLNGKEYKCKVSNKALPAPIEKTISKAKGQ |
| | PREPQVYTLPPSREEMTKNQVSLTCLVKGFYPSDIAVEWESNGQPENNYKTTPPVLD |
| | SDGSFFLYSKLIVDKSRWQQGNVESCSVMHEALHNHYTQKSLSLSPGKIDPNKGSGT |
| | TSGTTRLLSGHTCFTLTGLLGTLVTMGLLT |
| | (SEQ ID NO: 224) |
| hPDL1-GPI | > Artificial sequence; hPDL1-GPI, DNA |
| | ATGAGGATATTTGCTGTCTTTATATTCATGACCTACTGGCATTTGCTGAACGCATTT |
| | ACTGTCACGGTTCCCAAGGACCTATATGTGGTAGAGTATGGTAGCAATATGACAATT |
| | GAATGCAAATTCCCAGTAGAAAAACAATTAGACCTGGCTGCACTAATTGTCTATTGG |
| | GAAATGGAGGATAAGAACATTATTCAATTTGTGCATGGAGAGGAAGACCTGAAGGTT |
| | CAGCATAGTAGCTACAGACAGAGGGCCCGGCTGTTGAAGGACCAGCTCTCCCTGGGA |
| | AATGCTGCACTTCAGATCACAGATGTGAAATTGCAGGATGCAGGGGTGTACCGCTGC |
| | ATGATCAGCTATGGTGGTGCCGACTACAAGCGAATTACTGTGAAAGTCAATGCCCCA |
| | TACAACAAAATCAACCAAAGAATTTTGGTTGTGGATCCAGTCACCTCTGAACATGAA |
| | CTGACATGTCAGGCTGAGGGCTACCCCAAGGCCGAAGTCATCTGGACAAGCAGTGAC |
| | CATCAAGTCCTGAGTGGTAAGACCACCACCACCAATTCCAAGAGAGAGGAGAAGCTT |
| | TTCAATGTGACCAGCACACTGAGAATCAACACAACAACTAATGAGATTTTCTACTGC |
| | ACTTTTAGGAGATTAGATCCTGAGGAAAACCATACAGCTGAATTGGTCATCCCAGAA |
| | CTACCTCTGGCACATCCTCCAAATGAAAGGCCAAATAAAGGAAGTGGAACCACTTCA |
| | GGTACTACCCGTCTTCTATCTGGGCACACGTGTTTCACGTTGACAGGTTTGCTTGGG |
| | ACGCTAGTAACCATGGGCTTGCTGACTTAG |
| | (SEQ ID NO: 225) |
| | >Amino Acid Sequence; hPDL1-GPI, Amino Acid |
| | MRIFAVFIFMTYWHLLNAFTVTVPKDLYVVEYGSNMTIECKFPVEKQLDLAALIVYW |
| | EMEDKNITQFVHGEEDLKVQHSSYRQRARLLKDQLSLGNAALQITDVKLQDAGVYRC |
| | MISYGGADYKRITVKVNAPYNKINQRILVVDPVTSEHELTCQAEGYPKAEVIWTSSD |
| | HQVLSGKTTTTNSKREEKLFNVTSTLRINTTTNEIFYCTFRRLDPEENHTAELVIPE |
| | LPLAHPPNERPNKGSGTTSGTTRLLSGHTCFTLTGLLGTLVTMGLLT |
| | (SEQ ID NO: 226) |
| hPDL1-C1C2 | >Artificial Sequence; hPDL1-C1C2, DNA |
| | ATGAGGATATTTGCTGTCTTTATATTCATGACCTACTGGCATTTGCTGAACGCATTT |
| | ACTGTCACGGTTCCCAAGGACCTATATGTGGTAGAGTATGGTAGCAATATGACAATT |
| | GAATGCAAATTCCCAGTAGAAAAACAATTAGACCTGGCTGCACTAATTGTCTATTGG |
| | GAAATGGAGGATAAGAACATTATTCAATTTGTGCATGGAGAGGAAGACCTGAAGGTT |
| | CAGCATAGTAGCTACAGACAGAGGGCCCGGCTGTTGAAGGACCAGCTCTCCCTGGGA |
| | AATGCTGCACTTCAGATCACAGATGTGAAATTGCAGGATGCAGGGGTGTACCGCTGC |
| | ATGATCAGCTATGGTGGTGCCGACTACAAGCGAATTACTGTGAAAGTCAATGCCCCA |
| | TACAACAAAATCAACCAAAGAATTTTGGTTGTGGATCCAGTCACCTCTGAACATGAA |
| | CTGACATGTCAGGCTGAGGGCTACCCCAAGGCCGAAGTCATCTGGACAAGCAGTGAC |
| | CATCAAGTCCTGAGTGGTAAGACCACCACCACCAATTCCAAGAGAGAGGAGAAGCTT |
| | TTCAATGTGACCAGCACACTGAGAATCAACACAACAACTAATGAGATTTTCTACTGC |
| | ACTTTTAGGAGATTAGATCCTGAGGAAAACCATACAGCTGAATTGGTCATCCCAGAA |
| | CTACCTCTGGCACATCCTCCAAATGAAAGGATCGATGTCGAGCCACTGGGCATGGAG |
| | AATGGGAACATTGCCAACTCACAGATCGCCGCCTCATCTGTGCGTGTGACCTTCTTG |
| | GGTTTGCAGCATTGGGTCCCGGAGCTGGCCCGCCTGAACCGCGCAGGCATGGTCAAT |
| | GCCTGGACACCCAGCAGCAATGACGATAACCCCTGGATCCAGGTGAACCTGCTGCGG |
| | AGGATGTGGGTAACAGGTGTGGTGACGCAGGGTGCCAGCCGCTTGGCCAGTCATGAG |
| | TACCTGAAGGCCTTCAAGGTGGCCTACAGCCTTAATGGACACGAATTCGATTTCATC |
| | CATGATGTTAATAAAAAA+32AAGGAGTTTGTGGGTAACTGGAACAAAAACGCGGTG |
| | CATGTCAACCTGTTTGAGACCCCTGTGGAGGCTCAGTACGTGAGATTGTACCCCACG |
| | AGCTGCCACACGGCCTGCACTCTGCGCTTTGAGCTACTGGGCTGTGAGCTGAACGGA |
| | TGCGCCAATCCCCTGGGCCTGAAGAATAACAGCATCCCTGACAAGCAGATCACGGCC |
| | TCCAGCAGCTACAAGACCTGGGGCTTGCATCTCTTCAGCTGGAACCCCTCCTATGCA |
| | CGGCTGGACAAGCAGGGCAACTTCAACGCCTGGGTTGCGGGGAGCTACGGTAACGAT |
| | CAGTGGCTGCAGATCTTCCCTGGCAACTGGGACAACCACTCCCACAAGAAGAACTTG |
| | TTTGAGACGCCCATCCTGGCTCGCTATGTGCGCATCCTGCCTGTAGCCTGGCACAAC |
| | CGCATCGCCCTGCGCCTGGAGCTGCTGGGCTGTTAG |
| | (SEQ ID NO: 227) |
| | >Artificial Sequence, hPDL1-C1C2, Amino Acid |
| | MRIFAVFIFMTYWHLLNAFTVTVPKDLYVVEYGSNMTIECKFPVEKQLDLAALIVYW |
| | EMEDKNITQFVHGEEDLKVQHSSYRQRARLLKDQLSLGNAALQITDVKLQDAGVYRC |
| | MISYGGADYKRITVKVNAPYNKINQRILVVDPVTSEHELTCQAEGYPKAEVIWTSSD |
| | HQVLSGKTTTTNSKREEKLFNVTSTLRINTTTNEIFYCTFRRLDPEENHTAELVIPE |
| | LPLAHPPNERIDVEPLGMENGNIANSQIAASSVRVTFLGLQHWVPELARLNRAGMVN |
| | AWTPSSNDDNPWIQVNLLRRMWVTGVVTQGASRLASHEYLKAFKVAYSLNGHEFDFI |
| | HDVNKKHEEFVGNWNENAVHVNLFETPVEAQYVRLYPTSCHTACTLRFELLGCELNG |
| | CANPLGLKNNSIPDKQITASSSYKTWGLHIFSWNPSYARLDKQGNFNAWVAGSYGND |
| | QWLQIFPGNWDNHSHEKNLFETPILARYVRILPVAWHNRIALRLELLGC |
| | (SEQ ID NO: 228) |
| hPDL1-Fc-GFI | >Artificial Sequence; hPDL1-Fc-GPI, DNA |
| | ATGAGGATATTTGCTGTCTTTATATTCATGACCTACTGGCATTTGCTGAACGCATTT |
| | ACTGTCACGGTTCCCAAGGACCTATATGTGGTAGAGTATGGTAGCAATATGACAATT |
| | GAATGCAAATTCCCAGTAGAAAAACAATTAGACCTGGCTGCACTAATTGTCTATTGG |
| | GAAATGGAGGATAAGAACATTATTCAATTTGTGCATGGAGAGGAAGACCTGAAGGTT |
| | CAGCATAGTAGCTACAGACAGAGGGCCCGGCTGTTGAAGGACCAGCTCTCCCTGGGA |
| | AATGCTGCACTTCAGATCACAGATGTGAAATTGCAGGATGCAGGGGTGTACCGCTGC |
| | ATGATCAGCTATGGTGGTGCCGACTACAAGCGAATTACTGTGAAAGTCAATGCCCCA |
| | TACAACAAAATCAACCAAAGAATTTTGGTTGTGGATCCAGTCACCTCTGAACATGAA |
| | CTGACATGTCAGGCTGAGGGCTACCCCAAGGCCGAAGTCATCTGGACAAGCAGTGAC |
| | CATCAAGTCCTGAGTGGTAAGACCACCACCACCAATTCCAAGAGAGAGGAGAAGCTT |
| | TTCAATGTGACCAGCACACTGAGAATCAACACAACAACTAATGAGATTTTCTACTGC |
| | ACTTTTAGGAGATTAGATCCTGAGGAAAACCATACAGCTGAATTGGTCATCCCAGAA |
| | CTACCTCTGGCACATCCTCCAAATGAAAGGATCGATGACAAAACTCACACATGCCCA |
| | CCGTGCCCAGCACCTGAACTCCTGGGGGGACCGTCAGTCTTCCTCTTCCCCCCAAAA |
| | CCCAAGGACACCCTCATGATCTCCCGGACCCCTGAGGTCACATGCGTGGTGGTGGAC |
| | GTGAGCCACGAAGACCCTGAGGTCAAGTTCAACTGGTACGTGGACGGCGTGGAGGTG |
| | CATAATGCCAAGACAAAGCCGCGGGAGGAGCAGTACAACAGCACGTACCGTGTGGTC |
| | AGCGTCCTCACCGTCCTGCACCAGGACTGGCTGAATGGCAAGGAGTACAAGTGCAAG |
| | GTCTCCAACAAAGCCCTCCCAGCCCCCATCGAGAAAACCATCTCCAAAGCCAAAGGG |
| | CAGCCCCGAGAACCACAGGTGTACACCCTGCCCCCATCCCGGGAGGAGATGACCAAG |
| | AACCAGGTCAGCCTGACCTGCCTGGTCAAAGGCTTCTATCCCAGCGACATCGCCGTG |
| | GAGTGGGAGAGCAATGGGCAGCCGGAGAACAACTACAAGACCACGCCTCCCGTGCTG |
| | GACTCCGACGGCTCCTTCTTCCTCTACAGCAAGCTCACCGTGGACAAGAGCAGGTGG |
| | CAGCAGGGGAACGTCTTCTCATGCTCCGTGATGCACGAGGCTCTGCACAACCACTAC |
| | ACGCAGAAGAGCCTCTCCCTGTCTCCGGGTAAAATCGATCCAAATAAAGGAAGTGGA |
| | ACCACTTCAGGTACTACCCGTCTTCTATCTGGGCACACGTGTTTCACGTTGACAGGT |
| | TTGCTTGGGACGCTAGTAACCATGGGCTTGCTGACTTAG |
| | (SEQ ID NO: 229) |
| | > Artificial Sequence; hPDL1-Fc-GPI, Amino Acid |
| | MRIFAVFIFMTYWHLLNAFTVTVPKDLYVVEYGSNMTIECKFPVEKQLDLAALIVYW |
| | EMEDKNITQFVHGEEDLKVQHSSYRQRARLLKDQLSLGNAALQITDVKLQDAGVYRC |
| | MISYGGADYKRITVKVNAPYNKINQRILVVDPVTSEHELTCQAEGYPKAEVIWTSSD |
| | HQVLSGKTTTTNSKREEKLFNVTSTLRINTTTNEIFYCTFRRLDPEENHTAELVIPE |
| | LPLAHPPNERIDDKTHTCPPCPAPELLGGPSVFLFPPKPKDTLMISRTPEVTCVVVD |
| | VSHEDPEVKFNWYVDGVEVHNAKTKPREEQYNSTYRVVSVLTVLHQDWLNGKEYKCK |
| | VSNKALPAPIEKTISKAKGQPREPQVYTLPPSREEMTKNQVSLTCLVKGFYPSDIAV |
| | EWESNGQPENNYKTTPPVLDSDGSFFLYSKLTVDKSRWQQGNVFSCSVMHEALHNHY |
| | TQKSLSLSPGKIDPNKGSGTTSGTTRLLSGHTCFTLTGLLGTLVTMGLLT |
| | (SEQ ID NO: 230) |
| hPDL2-C1C2 | >Artificial Sequence; hPDL2-C1C2, DNA |
| | ATGATCTTCCTCCTGCTAATGTTGAGCCTGGAATTGCAGCTTCACCAGATAGCAGCT |
| | TTATTCACAGTGACAGTCCCTAAGGAACTGTACATAATAGAGCATGGCAGCAATGTG |
| | ACCCTGGAATGCAACTTTGACACTGGAAGTCATGTGAACCTTGGAGCAATAACAGCC |
| | AGTTTGCAAAAGGTGGAAAATGATACATCCCCACACCGTGAAAGAGCCACTTTGCTG |
| | GAGGAGCAGCTGCCCCTAGGGAAGGCCTCGTTCCACATACCTCAAGTCCAAGTGAGG |
| | GACGAAGGACAGTACCAATGCATAATCATCTATGGGGTCGCCTGGGACTACAAGTAC |
| | CTGACTCTGAAAGTCAAAGCTTCCTACAGGAAAATAAACACTCACATCCTAAAGGTT |
| | CCAGAAACAGATGAGGTAGAGCTCACCTGCCAGGCTACAGGTTATCCTCTGGCAGAA |
| | GTATCCTGGCCAAACGTCAGCGTTCCTGCCAACACCAGCCACTCCAGGACCCCTGAA |
| | GGCCTCTACCAGGTCACCAGTGTTCTGCGCCTAAAGCCACCCCCTGGCAGAAACTTC |
| | AGCTGTGTGTTCTGGAATACTCACGTGAGGGAACTTACTTTGGCCAGCATTGACCTT |
| | CAAAGTCAGATGGAACCCAGGACCCATCCAACTATCGATGTCGAGCCACTGGGCATG |
| | GAGAATGGGAACATTGCCAACTCACAGATCGCCGCCTCATCTGTGCGTGTGACCTTC |
| | TTGGGTTTGCAGCATTGGGTCCCGGAGCTGGCCCGCCTGAACCGCGCAGGCATGGTC |
| | AATGCCTGGACACCCAGCAGCAATGACGATAACCCCTGGATCCAGGTGAACCTGCTG |
| | CGGAGGATGTGGGTAACAGGTGTGGTGACGCAGGGTGCCAGCCGCTTGGCCAGTCAT |
| | GAGTACCTGAAGGCCTTCAAGGTGGCCTACAGCCTTAATGGACACGAATTCGATTTC |
| | ATCCATGATGTTAATAAAAAACACAAGGAGTTTGTGGGTAACTGGAACAAAAACGCG |
| | GTGCATGTCAACCTGTTTGAGACCCCTGTGGAGGCTCAGTACGTGAGATTGTACCCC |
| | ACGAGCTGCCACACGGCCTGCACTCTGCGCTTTGAGCTACTGGGCTGTGAGCTGAAC |
| | GGATGCGCCAATCCCCTGGGCCTGAAGAATAACAGCATCCCTGACAAGCAGATCACG |
| | GCCTCCAGCAGCTACAAGACCTGGGGCTTGCATCTCTTCAGCTGGAACCCCTCCTAT |
| | GCACGGCTGGACAAGCAGGGCAACTTCAACGCCTGGGTTGCGGGGAGCTACGGTAAC |
| | GATCAGTGGCTGCAGATCTTCCCTGGCAACTGGGACAACCACTCCCACAAGAAGAAC |
| | TTGTTTGAGACGCCCATCCTGGCTCGCTATGTGCGCATCCTGCCTGTAGCCTGGCAC |
| | AACCGCATCGCCCTGCGCCTGGAGCTGCTGGGCTGTTAG |
| | (SEQ ID NO: 231) |
| | > Artificial Sequence; hPDL2-C1C2, Amino Acid |
| | MIELLLMLSLELQLHQIAALFTVTVPKELYIIEHGSNVTLECNFDTGSHVNLGAITA |
| | SLQKVENDTSPHRERATLLEEQLPLGKASFHIPQVQVRDEGQYQCIIIYGVAWDYKY |
| | LTLKVKASYRKINTHILKVPETDEVELTCQATGYPLAEVSWPNVSVPANTSHSRTPE |
| | GLYQVTSVLRLKPPPGRNFSCVEWNTHVRELTLASIDLQSQMEPRTHPTIDVEPLGM |
| | ENGNIANSQIAASSVRVTFLGLQHWVPELARLNRAGMVNAWTPSSNDDNPWIQVNLL |
| | RRMWVTGVVTQGASRLASHEYLKAFKVAYSLNGHEFDFIHDVNKKHKEFVGNWNKNA |
| | VHVNLFETPVEAQYVRLYPTSCHTACTLRFELLGCELNGCANPLGLENNSIPDKQIT |
| | ASSSYKTWGLHLFSWNPSYARLDKQGNFNAWVAGSYGNDQWLQIFPGNWDNHSHKKN |
| | LFETPILARYVRILPVAWHNRIALRLELLGC |
| | (SEQ ID NO: 232) |
| hPDL2-Fc-GPI | >Artificial Sequence; hPDL2-Fc-GPI, DNA |
| | ATGATCTTCCTCCTGCTAATGTTGAGCCTGGAATTGCAGCTTCACCAGATAGCAGCT |
| | TTATTCACAGTGACAGTCCCTAAGGAACTGTACATAATAGAGCATGGCAGCAATGTG |
| | ACCCTGGAATGCAACTTTGACACTGGAAGTCATGTGAACCTTGGAGCAATAACAGCC |
| | AGTTTGCAAAAGGTGGAAAATGATACATCCCCACACCGTGAAAGAGCCACTTTGCTG |
| | GAGGAGCAGCTGCCCCTAGGGAAGGCCTCGTTCCACATACCTCAAGTCCAAGTGAGG |
| | GACGAAGGACAGTACCAATGCATAATCATCTATGGGGTCGCCTGGGACTACAAGTAC |
| | CTGACTCTGAAAGTCAAAGCTTCCTACAGGAAAATAAACACTCACATCCTAAAGGTT |
| | CCAGAAACAGATGAGGTAGAGCTCACCTGCCAGGCTACAGGTTATCCTCTGGCAGAA |
| | GTATCCTGGCCAAACGTCAGCGTTCCTGCCAACACCAGCCACTCCAGGACCCCTGAA |
| | GGCCTCTACCAGGTCACCAGTGTTCTGCGCCTAAAGCCACCCCCTGGCAGAAACTTC |
| | AGCTGTGTGTTCTGGAATACTCACGTGAGGGAACTTACTTTGGCCAGCATTGACCTT |
| | CAAAGTCAGATGGAACCCAGGACCCATCCAACTATCGATGACAAAACTCACACATGC |
| | CCACCGTGCCCAGCACCTGAACTCCTGGGGGGACCGTCAGTCTTCCTCTTCCCCCCA |
| | AAACCCAAGGACACCCTCATGATCTCCCGGACCCCTGAGGTCACATGCGTGGTGGTG |
| | GACGTGAGCCACGAAGACCCTGAGGTCAAGTTCAACTGGTACGTGGACGGCGTGGAG |
| | GTGCATAATGCCAAGACAAAGCCGCGGGAGGAGCAGTACAACAGCACGTACCGTGTG |
| | GTCAGCGTCCTCACCGTCCTGCACCAGGACTGGCTGAATGGCAAGGAGTACAAGTGC |
| | AAGGTCTCCAACAAAGCCCTCCCAGCCCCCATCGAGAAAACCATCTCCAAAGCCAAA |
| | GGGCAGCCCCGAGAACCACAGGTGTACACCCTGCCCCCATCCCGGGAGGAGATGACC |
| | AAGAACCAGGTCAGCCTGACCTGCCTGGTCAAAGGCTTCTATCCCAGCGACATCGCC |
| | GTGGAGTGGGAGAGCAATGGGCAGCCGGAGAACAACTACAAGACCACGCCTCCCGTG |
| | CTGGACTCCGACGGCTCCTTCTTCCTCTACAGCAAGCTCACCGTGGACAAGAGCAGG |
| | TGGCAGCAGGGGAACGTCTTCTCATGCTCCGTGATGCACGAGGCTCTGCACAACCAC |
| | TACACGCAGAAGAGCCTCTCCCTGTCTCCGGGTAAAATCGATCCAAATAAAGGAAGT |
| | GGAACCACTTCAGGTACTACCCGTCTTCTATCTGGGCACACGTGTTTCACGTTGACA |
| | GGTTTGCTTGGGACGCTAGTAACCATGGGCTTGCTGACTTAG |
| | (SEQ ID NO: 233) |
| | >Artificial Sequence; hPDL2-Fc-GPI, Amino Acid |
| | MIELLLMLSLELQLHQIAALFTVTVPKELYIIEHGSNVTLECNFDTGSHVNLGAITA |
| | SLQKVENDTSPHRERATLLEEQLPLGKASFHIPQVQVRDEGQYQCIIIYGVAWDYKY |
| | LTLKVKASYRKINTHILKVPETDEVELTCQATGYPLAEVSWPNVSVPANTSHSRTPE |
| | GLYQVTSVLRLKPPPGRNFSCVFWNTHVRELTLASIDLQSQMEPRTHPTIDDKTHTC |
| | PPCPAPELLGGPSVFLFPPKPKDTLMISRTPEVTCVVVDVSHEDPEVKFNWYVDGVE |
| | VHNAKTKPREEQYNSTYRVVSVLTVLHQDWLNGKEYKCKVSNKALPAPIEKTISKAK |
| | GQPREPQVYTLPPSREEMTKNQVSLTCLVKGFYPSDIAVEWESNGQPENNYKTTPPV |
| | LDSDGSFFLYSKLTVDKSRWQQGNVESCSVMHEALHNHYTQKSLSLSPGKIDPNKGS |
| | GTTSGTTRLLSGHTCFTLTGLLGTLVTMGLLT |
| | (SEQ ID NO: 234) |
| 4F2-h41BBL | >Artificial Sequence; 4F2-41BBL, DNA |
| | ATGAGCCAGGACACCGAGGTGGATATGAAGGAGGTGGAGCTGAATGAGTTAGAGCCC |
| | GAGAAGCAGCCGATGAACGCGGCGTCTGGGGCGGCCATGTCCCTGGCGGGAGCCGAG |
| | AAGAATGGTCTGGTGAAGATCAAGGTGGCGGAAGACGAGGCGGAGGCGGCAGCCGCG |
| | GCTAAGTTCACGGGCCTGTCCAAGGAGGAGCTGCTGAAGGTGGCAGGCAGCCCCGGC |
| | TGGGTACGCACCCGCTGGGCACTGCTGCTGCTCTTCTGGCTCGGCTGGCTCGGCATG |
| | CTTGCTGGTGCCGTGGTCATAATCGTGGCCTGCCCCTGGGCCGTGTCCGGGGCTCGC |
| | GCCTCGCCCGGCTCCGCGGCCAGCCCGAGACTCCGCGAGGGTCCCGAGCTTTCGCCC |
| | GACGATCCCGCCGGCCTCTTGGACCTGCGGCAGGGCATGTTTGCGCAGCTGGTGGCC |
| | CAAAATGTTCTGCTGATCGATGGGCCCCTGAGCTGGTACAGTGACCCAGGCCTGGCA |
| | GGCGTGTCCCTGACGGGGGGCCTGAGCTACAAAGAGGACACGAAGGAGCTGGTGGTG |
| | GCCAAGGCTGGAGTCTACTATGTCTTCTTTCAACTAGAGCTGCGGCGCGTGGTGGCC |
| | GGCGAGGGCTCAGGCTCCGTTTCACTTGCGCTGCACCTGCAGCCACTGCGCTCTGCT |
| | GCTGGGGCCGCCGCCCTGGCTTTGACCGTGGACCTGCCACCCGCCTCCTCCGAGGCT |
| | CGGAACTCGGCCTTCGGTTTCCAGGGCCGCTTGCTGCACCTGAGTGCCGGCCAGCGC |
| | CTGGGCGTCCATCTTCACACTGAGGCCAGGGCACGCCATGCCTGGCAGCTTACCCAG |
| | GGCGCCACAGTCTTGGGACTCTTCCGGGTGACCCCCGAAATCCCAGCCGGACTCCCT |
| | TCACCGAGGTCGGAATAA |
| | (SEQ ID NO: 235) |
| | >Artificial Sequence; 4F2-h41BBL, Amino Acid |
| | MSQDTEVDMKEVELNELEPEKQPMNAASGAAMSLAGAEKNGLVKIKVAEDEAEAAAA |
| | AKFTGLSKEELLKVAGSPGWVRTRWALLLLFWLGWLGMLAGAVVIIVACPWAVSGAR |
| | ASPGSAASPRLREGPELSPDDPAGLLDLRQGMFAQLVAQNVLLIDGPLSWYSDPGLA |
| | GVSLTGGLSYKEDTKELVVAKAGVYYVFFQLELRRVVAGEGSGSVSLALHLQPLRSA |
| | AGAAALALTVDLPPASSEARNSAFGFQGRLLHLSAGQRLGVHLHTEARARHAWQLTQ |
| | GATVLGLFRVTPEIPAGLPSPRSE |
| | (SEQ ID NO: 236) |
| hPDL1-4Fc-GPI | >Artificial Sequence; hPDL1-4Fc-GPI, DNA |
| | ATGAGGATATTTGCTGTCTTTATATTCATGACCTACTGGCATTTGCTGAACGCATTT |
| | ACTGTCACGGTTCCCAAGGACCTATATGTGGTAGAGTATGGTAGCAATATGACAATT |
| | GAATGCAAATTCCCAGTAGAAAAACAATTAGACCTGGCTGCACTAATTGTCTATTGG |
| | GAAATGGAGGATAAGAACATTATTCAATTTGTGCATGGAGAGGAAGACCTGAAGGTT |
| | CAGCATAGTAGCTACAGACAGAGGGCCCGGCTGTTGAAGGACCAGCTCTCCCTGGGA |
| | AATGCTGCACTTCAGATCACAGATGTGAAATTGCAGGATGCAGGGGTGTACCGCTGC |
| | ATGATCAGCTATGGTGGTGCCGACTACAAGCGAATTACTGTGAAAGTCAATGCCCCA |
| | TACAACAAAATCAACCAAAGAATTTTGGTTGTGGATCCAGTCACCTCTGAACATGAA |
| | CTGACATGTCAGGCTGAGGGCTACCCCAAGGCCGAAGTCATCTGGACAAGCAGTGAC |
| | CATCAAGTCCTGAGTGGTAAGACCACCACCACCAATTCCAAGAGAGAGGAGAAGCTT |
| | TTCAATGTGACCAGCACACTGAGAATCAACACAACAACTAATGAGATTTTCTACTGC |
| | ACTTTTAGGAGATTAGATCCTGAGGAAAACCATACAGCTGAATTGGTCATCCCAGAA |
| | CTACCTCTGGCACATCCTCCAAATGAAAGGGAGTCCAAATATGGTCCCCCATGCCCA |
| | TCATGCCCAGCACCTGAGTTCCTGGGGGGACCATCAGTCTTCCTGTTCCCCCCAAAA |
| | CCCAAGGACACTCTCATGATCTCCCGGACCCCTGAGGTCACGTGCGTGGTGGTGGAC |
| | GTGAGCCAGGAAGACCCCGAGGTCCAGTTCAACTGGTACGTGGATGGCGTGGAGGTG |
| | CATAATGCCAAGACAAAGCCGCGGGAGGAGCAGTTCAACAGCACGTACCGTGTGGTC |
| | AGGGTCCTCACCGTCCTGCACCAGGACTGGCTGAACGGTAAGGAGTACAAGTGCAAG |
| | GTCTCCAACAAAGGCCTCCCGTCCTCCATCGAGAAAACCATCTCCAAAGCCAAAGGG |
| | CAGCCCCGAGAGCCACAGGTGTACACCCTGCCCCCATCCCAGGAGGAGATGACCAAG |
| | AACCAGGTCAGCCTGACCTGCCTGGTCAAAGGCTTCTACCCCAGCGACATCGCCGTG |
| | GAGTGGGAGAGCAATGGGCAGCCGGAGGACAACTACAAGACCACGCCTCCCGTGCTG |
| | GACTCCGACGGCTCCTTCTTCCTCTACAGCAGGCTAACCGTGGACAAGAGCAGGTGG |
| | CAGGAGGGGAATGTCTTCTCATGCTCCGTGATGCATGAGGCTCTGCACAACCACTAC |
| | ACACAGAAGAGCCTCTCCCTGTCTCCGGGTAAACCAAATAAAGGAAGTGGAACCACT |
| | TCAGGTACTACCCGTCTTCTATCTGGGCACACGTGTTTCACGTTGACAGGTTTGCTT |
| | GGGACGCTAGTAACCATGGGCTTGCTGACTTAG |
| | (SEQ ID NO: 237) |
| | >Artificial Sequence; hPDL1-4Fc-GPI, Amino Acid |
| | MRIFAVFIFMTYWHLLNAFTVTVPKDLYVVEYGSNMTIECKFPVEKQLDLAALIVYW |
| | EMEDKNITQFVHGEEDLKVQHSSYRQRARLLKDQLSLGNAALQITDVKLQDAGVYRC |
| | MISYGGADYKRITVKVNAPYNKINQRILVVDPVTSEHELTCQAEGYPKAEVIWTSSD |
| | HQVLSGKTTTTNSKREEKLFNVTSTLRINTTTNEIFYCTFRRLDPEENHTAELVIPE |
| | LPLAHPPNERESKYGPPCPSCPAPEFLGGPSVFLFPPKPKDTLMISRTPEVTCVVVD |
| | VSQEDPEVQFNWYVDGVEVHNAKTKPREEQFNSTYRVVRVLTVLHQDWLNGKEYKCK |
| | VSNKGLPSSIEKTISKAKGQPREPQVYTLPPSQEEMTKNQVSLTCLVKGFYPSDIAV |
| | EWESNGQPEDNYKTTPPVLDSDGSFFLYSRLTVDKSRWQEGNVFSCSVMHEALHNHY |
| | TQKSLSLSPGKPNKGSGTTSGTTRLLSGHTCFTLTGLLGTLVTMGLLT |
| | (SEQ ID NO: 238) |
| hPDL1-GPI-P2A- | >Artificial Sequence; hPDL1-GPI-P2A-hFGL1-GPI, DNA |
| hFGL1-GPI | ATGAGGATATTTGCTGTCTTTATATTCATGACCTACTGGCATTTGCTGAACGCATTT |
| | ACTGTCACGGTTCCCAAGGACCTATATGTGGTAGAGTATGGTAGCAATATGACAATT |
| | GAATGCAAATTCCCAGTAGAAAAACAATTAGACCTGGCTGCACTAATTGTCTATTGG |
| | GAAATGGAGGATAAGAACATTATTCAATTTGTGCATGGAGAGGAAGACCTGAAGGTT |
| | CAGCATAGTAGCTACAGACAGAGGGCCCGGCTGTTGAAGGACCAGCTCTCCCTGGGA |
| | AATGCTGCACTTCAGATCACAGATGTGAAATTGCAGGATGCAGGGGTGTACCGCTGC |
| | ATGATCAGCTATGGTGGTGCCGACTACAAGCGAATTACTGTGAAAGTCAATGCCCCA |
| | TACAACAAAATCAACCAAAGAATTTTGGTTGTGGATCCAGTCACCTCTGAACATGAA |
| | CTGACATGTCAGGCTGAGGGCTACCCCAAGGCCGAAGTCATCTGGACAAGCAGTGAC |
| | CATCAAGTCCTGAGTGGTAAGACCACCACCACCAATTCCAAGAGAGAGGAGAAGCTT |
| | TTCAATGTGACCAGCACACTGAGAATCAACACAACAACTAATGAGATTTTCTACTGC |
| | ACTTTTAGGAGATTAGATCCTGAGGAAAACCATACAGCTGAATTGGTCATCCCAGAA |
| | CTACCTCTGGCACATCCTCCAAATGAAAGGCCAAATAAAGGAAGTGGAACCACTTCA |
| | GGTACTACCCGTCTTCTATCTGGGCACACGTGTTTCACGTTGACAGGTTTGCTTGGG |
| | ACGCTAGTAACCATGGGCTTGCTGACTGGAAGCGGAGCTACTAACTTCAGCCTGCTG |
| | AAGCAGGCTGGCGACGTGGAGGAGAACCCTGGACCTATGGCAAAGGTGTTCAGTTTC |
| | ATCCTTGTTACCACCGCTCTGACAATGGGCAGGGAAATTTCGGCGCTCGAGGACTGT |
| | GCCCAGGAGCAGATGCGGCTCAGAGCCCAGGTGCGCCTGCTTGAGACCCGGGTCAAA |
| | CAGCAACAGGTCAAGATCAAGCAGCTTTTGCAGGAGAATGAAGTCCAGTTCCTTGAT |
| | AAAGGAGATGAGAATACTGTCATTGATCTTGGAAGCAAGAGGCAGTATGCAGATTGT |
| | TCAGAGATTTTCAATGATGGGTATAAGCTCAGTGGATTTTACAAAATCAAACCTCTC |
| | CAGAGCCCAGCAGAATTTTCTGTTTATTGTGACATGTCCGATGGAGGAGGATGGACT |
| | GTAATTCAGAGACGATCTGATGGCAGTGAAAACTTTAACAGAGGATGGAAAGACTAT |
| | GAAAATGGCTTTGGAAATTTTGTCCAAAAACATGGTGAATATTGGCTGGGCAATAAA |
| | AATCTTCACTTCTTGACCACTCAAGAAGACTACACTTTAAAAATCGACCTTGCAGAT |
| | TTTGAAAAAAATAGCCGTTATGCACAATATAAGAATTTCAAAGTTGGAGATGAAAAG |
| | AATTTCTACGAGTTGAATATTGGGGAATATTCTGGAACAGCTGGAGATTCCCTTGCG |
| | GGGAATTTTCATCCTGAGGTGCAGTGGTGGGCTAGTCACCAAAGAATGAAATTCAGC |
| | ACGTGGGACAGAGATCATGACAACTATGAAGGGAACTGCGCAGAAGAAGATCAGTCT |
| | GGCTGGTGGTTTAACAGGTGTCACTCTGCAAACCTGAATGGTGTATACTACAGCGGC |
| | CCCTACACGGCTAAAACAGACAATGGGATTGTCTGGTACACCTGGCATGGGTGGTGG |
| | TATTCTCTGAAATCTGTGGTTATGAAAATTAGGCCAAATGATTTTATTCCAAATGTA |
| | ATTCCAAATAAAGGAAGTGGAACCACTTCAGGTACTACCCGTCTTCTATCTGGGCAC |
| | ACGTGTTTCACGTTGACAGGTTTGCTTGGGACGCTAGTAACCATGGGCTTGCTGACT |
| | TAG |
| | (SEQ ID NO: 239) |
| | >Artificial Sequence; hPDL1-GPI-P2A-hFGL1-GPI, Amino Acid |
| | MRIFAVFIFMTYWHLLNAFTVTVPKDLYVVEYGSNMTIECKFPVEKQLDLAALIVYW |
| | EMEDKNIIQFVHGEEDLKVQHSSYRQRARLLKDQLSLGNAALQITDVKLQDAGVYRC |
| | MISYGGADYKRITVKVNAPYNKINQRILVVDPVTSEHELTCQAEGYPKAEVIWTSSD |
| | HQVLSGETTTTNSEREEELFNVTSTLRINTTTNEIFYCTFRRLDPEENHTAELVIPE |
| | LPLAHPPNERPNKGSGTTSGTTRLLSGHTCFTLTGLLGTLVTMGLLTGSGATNFSLL |
| | KQAGDVEENPGPMAKVFSFILVTTALTMGREISALEDCAQEQMRLRAQVRLLETRVK |
| | QQQVKIKQLLQENEVQFLDKGDENTVIDLGSKRQYADCSEIFNDGYKLSGFYKIKPL |
| | QSPAEFSVYCDMSDGGGWTVIQRRSDGSENFNRGWEDYENGFGNFVQKHGEYWLGNK |
| | NLHFLTTQEDYTLKIDLADFEENSRYAQYENFKVGDEENFYELNIGEYSGTAGDSLA |
| | GNFHPEVQWWASHQRMKFSTWDRDHDNYEGNCAEEDQSGWWFNRCHSANLNGVYYSG |
| | PYTAKTDNGIVWYTWHGWWYSLKSVVMKIRPNDFIPNVIPNKGSGTTSGTTRLLSGH |
| | TCFTLTGLLGTLVTMGLLT |
| | (SEQ ID NO: 240) |
| Myr-mScarlet | >Artificial Sequence; Myr -mScarlet, DNA |
| | ATGGGTTGCTGTTTCTCCAAGACCGGCTCGAGCGGCGTGAGCAAGGGCGAGGCAGTG |
| | ATCAAGGAGTTCATGCGGTTCAAGGTGCACATGGAGGGCTCCATGAACGGCCACGAG |
| | TTCGAGATCGAGGGCGAGGGCGAGGGCCGCCCCTACGAGGGCACCCAGACCGCCAAG |
| | CTGAAGGTGACCAAGGGTGGCCCCCTGCCCTTCTCCTGGGACATCCTGTCCCCTCAG |
| | TTCATGTACGGCTCCAGGGCCTTCACCAAGCACCCCGCCGACATCCCCGACTACTAT |
| | AAGCAGTCCTTCCCCGAGGGCTTCAAGTGGGAGCGCGTGATGAACTTCGAGGACGGC |
| | GGCGCCGTGACCGTGACCCAGGACACCTCCCTGGAGGACGGCACCCTGATCTACAAG |
| | GTGAAGCTCCGCGGCACCAACTTCCCTCCTGACGGCCCCGTAATGCAGAAGAAGACA |
| | ATGGGCTGGGAAGCGTCCACCGAGCGGTTGTACCCCGAGGACGGCGTGCTGAAGGGC |
| | GACATTAAGATGGCCCTGCGCCTGAAGGACGGCGGCCGCTACCTGGCGGACTTCAAG |
| | ACCACCTACAAGGCCAAGAAGCCCGTGCAGATGCCCGGCGCCTACAACGTCGACCGC |
| | AAGTTGGACATCACCTCCCACAACGAGGACTACACCGTGGTGGAACAGTACGAACGC |
| | TCCGAGGGCCGCCACTCCACCGGCGGCATGGACGAGCTGTACAAG |
| | (SEQ ID NO: 241) |
| | >Artificial Sequence; Myr-mScarlet, Amino Acid |
| | MGCCFSKTGSSGVSKGEAVIKEFMREKVHMEGSMNGHEFEIEGEGEGRPYEGTQTAK |
| | LKVTKGGPLPFSWDILSPQEMYGSRAFTKHPADIPDYYKQSFPEGFKWERVMNFEDG |
| | GAVTVTQDTSLEDGTLIYKVKLRGTNEPPDGPVMQKKTMGWEASTERLYPEDGVLKG |
| | DIKMALRLKDGGRYLADFKTTYKAKKPVQMPGAYNVDRKLDITSHNEDYTVVEQYER |
| | SEGRHSTGGMDELYK |
| | (SEQ ID NO: 242) |
| Myr-NanoLuc | > Artificial Sequence; Myr-NanoLuc, DNA |
| Luciferase | ATGGGTTGCTGTTTCTCCAAGACCGGCTCGAGCGGCGTCTTCACACTCGAAGATTTC |
| | GTTGGGGACTGGCGACAGACAGCCGGCTACAACCTGGACCAAGTCCTTGAACAGGGA |
| | GGTGTGTCCAGTTTGTTTCAGAATCTCGGGGTGTCCGTAACTCCGATCCAAAGGATT |
| | GTCCTGAGCGGTGAAAATGGGCTGAAGATCGACATCCATGTCATCATCCCGTATGAA |
| | GGTCTGAGCGGCGACCAAATGGGCCAGATCGAAAAAATTTTTAAGGTGGTGTACCCT |
| | GTGGATGATCATCACTTTAAGGTGATCCTGCACTATGGCACACTGGTAATCGACGGG |
| | GTTACGCCGAACATGATCGACTATTTCGGACGGCCGTATGAAGGCATCGCCGTGTTC |
| | GACGGCAAAAAGATCACTGTAACAGGGACCCTGTGGAACGGCAACAAAATTATCGAC |
| | GAGCGCCTGATCAACCCCGACGGCTCCCTGCTGTTCCGAGTAACCATCAACGGAGTG |
| | ACCGGCTGGCGGCTGTGCGAACGCATTCTGGCGTAA |
| | (SEQ ID NO: 243) |
| | >Artificial Sequence; Myr-NanoLuc, Amino Acid |
| | MGCCFSKTGSSGVETLEDFVGDWRQTAGYNLDQVLEQGGVSSLFQNLGVSVITIQRI |
| | VLSGENGLKIDIHVIIPYEGLSGDQMGQIEKIFKVVYPVDDHHFKVILHYGTLVIDG |
| | VTPNMIDYFGRPYEGIAVEDGKKITVTGTLWNGNKIIDERLINPDGSLLFRVTINGV |
| | TGWRLCERILA |
| | (SEQ ID NO: 244) |
| hSecPDL1-GPI | >Artificial Sequence; hSecPDL1-GPI, DNA |
| | ATGAGGATATTTGCTGTCTTTATATTCATGACCTACTGGCATTTGCTGAACGCATTT |
| | ACTGTCACGGTTCCCAAGGACCTATATGTGGTAGAGTATGGTAGCAATATGACAATT |
| | GAATGCAAATTCCCAGTAGAAAAACAATTAGACCTGGCTGCACTAATTGTCTATTGG |
| | GAAATGGAGGATAAGAACATTATTCAATTTGTGCATGGAGAGGAAGACCTGAAGGTT |
| | CAGCATAGTAGCTACAGACAGAGGGCCCGGCTGTTGAAGGACCAGCTCTCCCTGGGA |
| | AATGCTGCACTTCAGATCACAGATGTGAAATTGCAGGATGCAGGGGTGTACCGCTGC |
| | ATGATCAGCTATGGTGGTGCCGACTACAAGCGAATTACTGTGAAAGTCAATGCCCCA |
| | TACAACAAAATCAACCAAAGAATTTTGGTTGTGGATCCAGTCACCTCTGAACATGAA |
| | CTGACATGTCAGGCTGAGGGCTACCCCAAGGCCGAAGTCATCTGGACAAGCAGTGAC |
| | CATCAAGTCCTGAGTGGTAAGACCACCACCACCAATTCCAAGAGAGAGGAGAAGCTT |
| | TTCAATGTGACCAGCACACTGAGAATCAACACAACAACTAATGAGATTTTCTACTGC |
| | ACTTTTAGGAGATTAGATCCTGAGGAAAACCATACAGCTGAATTGGTCATCCCAGGT |
| | AATATTCTGAATGTGTCCATTAAAATATGTCTAACACTGTCCCCTAGCACCCCAAAT |
| | AAAGGAAGTGGAACCACTTCAGGTACTACCCGTCTTCTATCTGGGCACACGTGTTTC |
| | ACGTTGACAGGTTTGCTTGGGACGCTAGTAACCATGGGCTTGCTGACTTAG |
| | (SEQ ID NO: 245) |
| | >Artificial Sequence; hSecPDL1-GPI, Amino Acid |
| | MRIFAVFIFMTYWHLLNAFTVTVPKDLYVVEYGSNMTIECKFPVEKQLDLAALIVYW |
| | EMEDKNITQFVHGEEDLKVQHSSYRQRARLLKDQLSLGNAALQITDVKLQDAGVYRC |
| | MISYGGADYKRITVKVNAPYNKINQRILVVDPVTSEHELTCQAEGYPKAEVIWTSSD |
| | HQVLSGKTTTTNSKREEKLENVTSTLRINTTTNEIFYCTERRLDPEENHTAELVIPG |
| | NILNVSIKICLTLSPSTPNKGSGTTSGTTRLLSGHTCFTLTGLLGTLVTMGLLT |
| | (SEQ ID NO: 246) |
| Tfr2-h41BBL | >Artificial Sequence; Tfr2-h41BBL,DNA |
| | ATGGAGCGGCTTTGGGGTCTATTCCAGAGAGCGCAACAACTGTCCCCAAGATCCTCT |
| | CAGACCGTCTACCAGCGTGTGGAAGGCCCCCGGAAAGGGCACCTGGAGGAGGAAGAG |
| | GAAGACGGGGAGGAGGGGGCGGAGACATTGGCCCACTTCTGCCCCATGGAGCTGAGG |
| | GGCCCTGAGCCCCTGGGCTCTAGACCCAGGCAGCCAAACCTCATTCCCTGGGCGGCA |
| | GCAGGACGGAGGGCTGCCCCCTACCTGGTCCTGACGGCCCTGCTGATCTTCACTGGG |
| | GCCTTCCTACTGGGCTACGTCGCCTTCCGAGGGTCC [symbol] [symbol] |
| | [symbol] [symbol] [symbol] [symbol] [symbol] [symbol] |
| | [symbol] [symbol] [symbol] [symbol] [symbol] [symbol] |
| | [symbol] [symbol] [symbol] [symbol] [symbol] [symbol] |
| | [symbol] [symbol] [symbol] [symbol] [symbol] [symbol] |
| | [symbol] [symbol] [symbol] [symbol] [symbol] [symbol] |
| | [symbol] [symbol] [symbol] [symbol] [symbol] [symbol] |
| | [symbol] [symbol] [symbol] [symbol] [symbol] [symbol] |
| | [symbol] [symbol] [symbol] [symbol] [symbol] [symbol] |
| | [symbol] [symbol] [symbol] [symbol] [symbol] [symbol] |
| | [symbol] [symbol] [symbol] [symbol] [symbol] [symbol] |
| | [symbol] [symbol] [symbol] |
| | (SEQ ID NO: 247) |
| | >Artificial Sequence; Tfr2-h41BBL, Amino Acid |
| | MERLWGLFQRAQQLSPRSSQTVYQRVEGPRKGHLEEEEEDGEEGAETLAHFCPMELR |
| | GPEPLGSRPRQPNLIPWAAAGRRAAPYLVLTALLIFTGAFLLGYVAFRGSACPWAVS |
| | GARASPGSAASPRLRGPELSPDDPAGLLDLRQGMFAQLVAQNVLLIDGPLSWYSDPG |
| | LAGVSLTGGLSYKEDTKELVVAKAGVYYVFFQLELRRVVAGEGSGSVSLALHLQPLR |
| | SAAGAAALALTVDLPPASSEARNSAFGFQGRLLHLSAGQRLGVHLHTEARARHAWQL |
| | TQGATVLGLFRVTPEIPAGLPSPRSE |
| | (SEQ ID NO: 248) |
| CD9tm3-h41BBL | >Artificial Sequence; CD9tm3-h41BBL, DNA |
| | ATGGGCTGCTGCGGGGCTGTGCAGGAGTCCCAGTGCATGCTGGGACTGTTCTTCGGC |
| | TTCCTCTTGGTGATATTCGCCATTGAAATAGCTGCGGCCATCTGGGGATATTCCCAC |
| | AAGGATGAGGCCTGCCCCTGGGCCGTGTCCGGGGCTCGCGCCTCGCCCGGCTCCGCG |
| | GCCAGCCCGAGACTCCGCGAGGGTCCCGAGCTTTCGCCCGACGATCCCGCCGGCCTC |
| | TTGGACCTGCGGCAGGGCATGTTTGCGCAGCTGGTGGCCCAAAATGTTCTGCTGATC |
| | GATGGGCCCCTGAGCTGGTACAGTGACCCAGGCCTGGCAGGCGTGTCCCTGACGGGG |
| | GGCCTGAGCTACAAAGAGGACACGAAGGAGCTGGTGGTGGCCAAGGCTGGAGTCTAC |
| | TATGTCTTCTTTCAACTAGAGCTGCGGCGCGTGGTGGCCGGCGAGGGCTCAGGCTCC |
| | GTTTCACTTGCGCTGCACCTGCAGCCACTGCGCTCTGCTGCTGGGGCCGCCGCCCTG |
| | GCTTTGACCGTGGACCTGCCACCCGCCTCCTCCGAGGCTCGGAACTCGGCCTTCGGT |
| | TTCCAGGGCCGCTTGCTGCACCTGAGTGCCGGCCAGCGCCTGGGCGTCCATCTTCAC |
| | ACTGAGGCCAGGGCACGCCATGCCTGGCAGCTTACCCAGGGCGCCACAGTCTTGGGA |
| | CTCTTCCGGGTGACCCCCGAAATCCCAGCCGGACTCCCTTCACCGAGGTCGGAATAA |
| | (SEQ ID NO: 249) |
| | >Artificial Sequence; CD9tm3-h41BBL, Amino Acid |
| | MGCCGAVQESQCMLGLFFGFLLVIFAIEIAAAIWGYSHKDEACPWAVSGARASPGSA |
| | ASPRLREGPELSPDDPAGLLDLRQGMFAQLVAQNVLLIDGPLSWYSDPGLAGVSLTG |
| | GLSYKEDTKELVVAKAGVYYVFFQLELRRVVAGEGSGSVSLALELQPLRSAAGAAAL |
| | ALTVDLPPASSEARNSAFGFQGRLLELSAGQRLGVELETEARARHAWQLTQGATVLG |
| | LFRVTPEIPAGLPSPRSE |
| | (SEQ ID NO: 250) |
| Myr/Palm-4F2- | >Artificial Sequence; Myr/Palm-4F2-h41BBL,DNA |
| h41BBL | ATGGGTTGCTGTTTCTCCAAGACCGGCTCGAGCGGCAGCCAGGACACCGAGGTGGAT |
| | ATGAAGGAGGTGGAGCTGAATGAGTTAGAGCCCGAGAAGCAGCCGATGAACGCGGCG |
| | TCTGGGGCGGCCATGTCCCTGGCGGGAGCCGAGAAGAATGGTCTGGTGAAGATCAAG |
| | GTGGCGGAAGACGAGGCGGAGGCGGCAGCCGCGGCTAAGTTCACGGGCCTGTCCAAG |
| | GAGGAGCTGCTGAAGGTGGCAGGCAGCCCCGGCTGGGTACGCACCCGCTGGGCACTG |
| | CTGCTGCTCTTCTGGCTCGGCTGGCTCGGCATGCTTGCTGGTGCCGTGGTCATAATC |
| | GTGGCCTGCCCCTGGGCCGTGTCCGGGGCTCGCGCCTCGCCCGGCTCCGCGGCCAGC |
| | CCGAGACTCCGCGAGGGTCCCGAGCTTTCGCCCGACGATCCCGCCGGCCTCTTGGAC |
| | CTGCGGCAGGGCATGTTTGCGCAGCTGGTGGCCCAAAATGTTCTGCTGATCGATGGG |
| | CCCCTGAGCTGGTACAGTGACCCAGGCCTGGCAGGCGTGTCCCTGACGGGGGGCCTG |
| | AGCTACAAAGAGGACACGAAGGAGCTGGTGGTGGCCAAGGCTGGAGTCTACTATGTC |
| | TTCTTTCAACTAGAGCTGCGGCGCGTGGTGGCCGGCGAGGGCTCAGGCTCCGTTTCA |
| | CTTGCGCTGCACCTGCAGCCACTGCGCTCTGCTGCTGGGGCCGCCGCCCTGGCTTTG |
| | ACCGTGGACCTGCCACCCGCCTCCTCCGAGGCTCGGAACTCGGCCTTCGGTTTCCAG |
| | GGCCGCTTGCTGCACCTGAGTGCCGGCCAGCGCCTGGGCGTCCATCTTCACACTGAG |
| | GCCAGGGCACGCCATGCCTGGCAGCTTACCCAGGGCGCCACAGTCTTGGGACTCTTC |
| | CGGGTGACCCCCGAAATCCCAGCCGGACTCCCTTCACCGAGGTCGGAATAA |
| | (SEQ ID NO: 251) |
| | >Artificial Sequence; Myr/Palm-4F2-h41BBL, Amino Acid |
| | MGCCFSKTGSSGSQDTEVDMKEVELNELEPEKQPMNAASGAAMSLAGAEKNGLVKIK |
| | VAEDEAEAAAAAKFTGLSKEELLEVAGSPGWVRTRWALLLLFWLGWLGMLAGAVVII |
| | VACPWAVSGARASPGSAASPRLREGPELSPDDPAGLLDLRQGMFAQLVAQNVLLIDG |
| | PLSWYSDPGLAGVSLTGGLSYKEDTKELVVAKAGVYYVFFQLELRRVVAGEGSGSVS |
| | LALELQPLRSAAGAAALALTVDLPPASSEARNSAFGFQGRLLELSAGQRLGVELETE |
| | ARARHAWQLTQGATVLGLFRVTPEIPAGLPSPRSE |
| | (SEQ ID NO: 252) |
| Myr/Palm-Link- | >Artificial Sequence; Myr/Pa/m-Link-41BBL, DNA |
| 41 BBL (41BBL | ATGGGTTGCTGTTTCTCCAAGACCGGCTCGAGCGGCTGGGCCCTGGTCGCGGGGCTG |
| transmembrane | CTGCTGCTGCTGCTGCTCGCTGCCGCCTGCGCCGTCTTCCTCGCCTGCCCCTGGGCC |
| domain | GTGTCCGGGGCTCGCGCCTCGCCCGGCTCCGCGGCCAGCCCGAGACTCCGCGAGGGT |
| included) | CCCGAGCTTTCGCCCGACGATCCCGCCGGCCTCTTGGACCTGCGGCAGGGCATGTTT |
| | GCGCAGCTGGTGGCCCAAAATGTTCTGCTGATCGATGGGCCCCTGAGCTGGTACAGT |
| | GACCCAGGCCTGGCAGGCGTGTCCCTGACGGGGGGCCTGAGCTACAAAGAGGACACG |
| | AAGGAGCTGGTGGTGGCCAAGGCTGGAGTCTACTATGTCTTCTTTCAACTAGAGCTG |
| | CGGCGCGTGGTGGCCGGCGAGGGCTCAGGCTCCGTTTCACTTGCGCTGCACCTGCAG |
| | CCACTGCGCTCTGCTGCTGGGGCCGCCGCCCTGGCTTTGACCGTGGACCTGCCACCC |
| | GCCTCCTCCGAGGCTCGGAACTCGGCCTTCGGTTTCCAGGGCCGCTTGCTGCACCTG |
| | AGTGCCGGCCAGCGCCTGGGCGTCCATCTTCACACTGAGGCCAGGGCACGCCATGCC |
| | TGGCAGCTTACCCAGGGCGCCACAGTCTTGGGACTCTTCCGGGTGACCCCCGAAATC |
| | CCAGCCGGACTCCCTTCACCGAGGTCGGAATAA |
| | (SEQ ID NO: 253) |
| | >Artificial Sequence; Myr/Palm-Link-41BBL, Amino Acid |
| | MGCCFSKTGSSGWALVAGLLLLLLLAAACAVFLACPWAVSGARASPGSAASPRLREG |
| | PELSPDDPAGLLDLRQGMFAQLVAQNVLLIDGPLSWYSDPGLAGVSLTGGLSYKEDT |
| | KELVVAKAGVYYVFFQLELRRVVAGEGSGSVSLALHLQPLRSAAGAAALALTVDLPP |
| | ASSEARNSAFGFQGRLLHLSAGQRLGVHLHTEARARHAWQLTQGATVLGLFRVTPEI |
| | PAGLPSPRSE |
| | (SEQ ID NO: 254) |
| hPDL1-Link-GPI | >Artificial Sequence; hPDL1-Link-GPI, DNA |
| | ATGAGGATATTTGCTGTCTTTATATTCATGACCTACTGGCATTTGCTGAACGCATTT |
| | ACTGTCACGGTTCCCAAGGACCTATATGTGGTAGAGTATGGTAGCAATATGACAATT |
| | GAATGCAAATTCCCAGTAGAAAAACAATTAGACCTGGCTGCACTAATTGTCTATTGG |
| | GAAATGGAGGATAAGAACATTATTCAATTTGTGCATGGAGAGGAAGACCTGAAGGTT |
| | CAGCATAGTAGCTACAGACAGAGGGCCCGGCTGTTGAAGGACCAGCTCTCCCTGGGA |
| | AATGCTGCACTTCAGATCACAGATGTGAAATTGCAGGATGCAGGGGTGTACCGCTGC |
| | ATGATCAGCTATGGTGGTGCCGACTACAAGCGAATTACTGTGAAAGTCAATGCCCCA |
| | TACAACAAAATCAACCAAAGAATTTTGGTTGTGGATCCAGTCACCTCTGAACATGAA |
| | CTGACATGTCAGGCTGAGGGCTACCCCAAGGCCGAAGTCATCTGGACAAGCAGTGAC |
| | CATCAAGTCCTGAGTGGTAAGACCACCACCACCAATTCCAAGAGAGAGGAGAAGCTT |
| | TTCAATGTGACCAGCACACTGAGAATCAACACAACAACTAATGAGATTTTCTACTGC |
| | ACTTTTAGGAGATTAGATCCTGAGGAAAACCATACAGCTGAATTGGGCTCGAGCGGC |
| | CCAAATAAAGGAAGTGGAACCACTTCAGGTACTACCCGTCTTCTATCTGGGCACACG |
| | TGTTTCACGTTGACAGGTTTGCTTGGGACGCTAGTAACCATGGGCTTGCTGACTTAG |
| | (SEQ ID NO: 255) |
| | >Artificial Sequence; hPDL1-Link-GPI, Amino Acid |
| | MRIFAVFIFMTYWHLLNAFTVTVPKDLYVVEYGSNMTIECKFPVEKQLDLAALIVYW |
| | EMEDKNITQFVHGEEDLKVQHSSYRQRARLLKDQLSLGNAALQITDVKLQDAGVYRC |
| | MISYGGADYKRITVKVNAPYNKINQRILVVDPVTSEHELTCQAEGYPKAEVIWTSSD |
| | HQVLSGKTTTTNSKREEKLFNVTSTLRINTTTNEIFYCTFRRLDPEENHTAELGSSG |
| | PNKGSGTTSGTTRLLSGHTCFTLTGLLGTLVTMGLLT |
| | (SEQ ID NO: 256) |
| nSecPDL1- | >Artificial Sequence; hSecPDL1-CD9tm2, DNA |
| CD9tm2 | ATGAGGATATTTGCTGTCTTTATATTCATGACCTACTGGCATTTGCTGAACGCATTT |
| | ACTGTCACGGTTCCCAAGGACCTATATGTGGTAGAGTATGGTAGCAATATGACAATT |
| | GAATGCAAATTCCCAGTAGAAAAACAATTAGACCTGGCTGCACTAATTGTCTATTGG |
| | GAAATGGAGGATAAGAACATTATTCAATTTGTGCATGGAGAGGAAGACCTGAAGGTT |
| | CAGCATAGTAGCTACAGACAGAGGGCCCGGCTGTTGAAGGACCAGCTCTCCCTGGGA |
| | AATGCTGCACTTCAGATCACAGATGTGAAATTGCAGGATGCAGGGGTGTACCGCTGC |
| | ATGATCAGCTATGGTGGTGCCGACTACAAGCGAATTACTGTGAAAGTCAATGCCCCA |
| | TACAACAAAATCAACCAAAGAATTTTGGTTGTGGATCCAGTCACCTCTGAACATGAA |
| | CTGACATGTCAGGCTGAGGGCTACCCCAAGGCCGAAGTCATCTGGACAAGCAGTGAC |
| | CATCAAGTCCTGAGTGGTAAGACCACCACCACCAATTCCAAGAGAGAGGAGAAGCTT |
| | TTCAATGTGACCAGCACACTGAGAATCAACACAACAACTAATGAGATTTTCTACTGC |
| | ACTTTTAGGAGATTAGATCCTGAGGAAAACCATACAGCTGAATTGGTCATCCCAGGT |
| | AATATTCTGAATGTGTCCATTAAAATATGTCTAACACTGTCCCCTAGCACCTTCTAC |
| | ACAGGAGTCTATATTCTGATCGGAGCCGGCGCCCTCATGATGCTGGTGGGCTTCCTG |
| | GGCTGCTGCGGGGCTGTGCAGGAGTCCCAGTGCTAG |
| | (SEQ ID NO: 257) |
| | >Artificial Sequence; hSecPDL1-CD9tm2, Amino Acid |
| | MRIFAVFIFMTYWHLLNAFTVTVPKDLYVVEYGSNMTIECKFPVEKQLDLAALIVYW |
| | EMEDKNITQFVHGEEDLKVQHSSYRQRARLLKDQLSLGNAALQITDVKLQDAGVYRC |
| | MISYGGADYKRITVKVNAPYNKINQRILVVDPVTSEHELTCQAEGYPKAEVIWTSSD |
| | HQVLSGKTTTTNSKREEKLFNVTSTLRINTTTNEIFYCTFRRLDPEENHTAELVIPG |
| | NILNVSIKICLTLSPSTFYTGVYILIGAGALMMLVGFLGCCGAVQESQC |
| | (SEQ ID NO: 258) |
| hSecPDL1- | >Artificial Sequence; hSecPDL1-CD9tm2-KRAS, DNA |
| CD9tm2- | ATGAGGATATTTGCTGTCTTTATATTCATGACCTACTGGCATTTGCTGAACGCATTT |
| modified KRAS | ACTGTCACGGTTCCCAAGGACCTATATGTGGTAGAGTATGGTAGCAATATGACAATT |
| | GAATGCAAATTCCCAGTAGAAAAACAATTAGACCTGGCTGCACTAATTGTCTATTGG |
| | GAAATGGAGGATAAGAACATTATTCAATTTGTGCATGGAGAGGAAGACCTGAAGGTT |
| | CAGCATAGTAGCTACAGACAGAGGGCCCGGCTGTTGAAGGACCAGCTCTCCCTGGGA |
| | AATGCTGCACTTCAGATCACAGATGTGAAATTGCAGGATGCAGGGGTGTACCGCTGC |
| | ATGATCAGCTATGGTGGTGCCGACTACAAGCGAATTACTGTGAAAGTCAATGCCCCA |
| | TACAACAAAATCAACCAAAGAATTTTGGTTGTGGATCCAGTCACCTCTGAACATGAA |
| | CTGACATGTCAGGCTGAGGGCTACCCCAAGGCCGAAGTCATCTGGACAAGCAGTGAC |
| | CATCAAGTCCTGAGTGGTAAGACCACCACCACCAATTCCAAGAGAGAGGAGAAGCTT |
| | TTCAATGTGACCAGCACACTGAGAATCAACACAACAACTAATGAGATTTTCTACTGC |
| | ACTTTTAGGAGATTAGATCCTGAGGAAAACCATACAGCTGAATTGGTCATCCCAGGT |
| | AATATTCTGAATGTGTCCATTAAAATATGTCTAACACTGTCCCCTAGCACCTTCTAC |
| | ACAGGAGTCTATATTCTGATCGGAGCCGGCGCCCTCATGATGCTGGTGGGCTTCCTG |
| | GGCTGCTGCGGGGCTGTGCAGGAGTCCCAGTGCAAAAAGAAGAAAAAGAAGTCAAAG |
| | ACAAAGTGTGTAATTATGTAA |
| | (SEQ ID NO: 259) |
| | >Artificial Sequence; hSecPDL1-CD9tm2-KRAS, Amino Acid |
| | MRIFAVFIFMTYWHLLNAFTVTVPKDLYVVEYGSNMTIECKFPVEKQLDLAALIVYW |
| | EMEDKNITQFVHGEEDLKVQHSSYRQRARLLKDQLSLGNAALQITDVKLQDAGVYRC |
| | MISYGGADYKRITVKVNAPYNKINQRILVVDPVTSEHELTCQAEGYPKAEVIWTSSD |
| | HQVLSGKTTTTNSKREEKLFNVTSTLRINTTTNEIFYCTFRRLDPEENHTAELVIPG |
| | NILNVSIKICLTLSPSTFYTGVYILIGAGALMMLVGFLGCCGAVQESQCKKKKKKSK |
| | TKCVIM |
| | (SEQ ID NO: 260) |
| hSecPDL1- | >Artificial Sequence; hSecPDL1-CD9tm4, DNA |
| CD9tm4 | ATGAGGATATTTGCTGTCTTTATATTCATGACCTACTGGCATTTGCTGAACGCATTT |
| | ACTGTCACGGTTCCCAAGGACCTATATGTGGTAGAGTATGGTAGCAATATGACAATT |
| | GAATGCAAATTCCCAGTAGAAAAACAATTAGACCTGGCTGCACTAATTGTCTATTGG |
| | GAAATGGAGGATAAGAACATTATTCAATTTGTGCATGGAGAGGAAGACCTGAAGGTT |
| | CAGCATAGTAGCTACAGACAGAGGGCCCGGCTGTTGAAGGACCAGCTCTCCCTGGGA |
| | AATGCTGCACTTCAGATCACAGATGTGAAATTGCAGGATGCAGGGGTGTACCGCTGC |
| | ATGATCAGCTATGGTGGTGCCGACTACAAGCGAATTACTGTGAAAGTCAATGCCCCA |
| | TACAACAAAATCAACCAAAGAATTTTGGTTGTGGATCCAGTCACCTCTGAACATGAA |
| | CTGACATGTCAGGCTGAGGGCTACCCCAAGGCCGAAGTCATCTGGACAAGCAGTGAC |
| | CATCAAGTCCTGAGTGGTAAGACCACCACCACCAATTCCAAGAGAGAGGAGAAGCTT |
| | TTCAATGTGACCAGCACACTGAGAATCAACACAACAACTAATGAGATTTTCTACTGC |
| | ACTTTTAGGAGATTAGATCCTGAGGAAAACCATACAGCTGAATTGGTCATCCCAGGT |
| | AATATTCTGAATGTGTCCATTAAAATATGTCTAACACTGTCCCCTAGCACCATCGGC |
| | GCAGTGGGCATCGGCATTGCCGTGGTCATGATATTTGGCATGATCTTCAGTATGATC |
| | TTGTGCTGTGCTATCCGCAGGAACCGCGAGATGGTCTAG |
| | (SEQ ID NO: 261) |
| | >Artificial Sequence; hSecPDL1-CD9tm4, Amino Acid |
| | MRIFAVFIFMTYWHLLNAFTVTVPKDLYVVEYGSNMTIECKFPVEKQLDLAALIVYW |
| | EMEDKNITQFVHGEEDLKVQHSSYRQRARLLKDQLSLGNAALQITDVKLQDAGVYRC |
| | MISYGGADYKRITVKVNAPYNKINQRILVVDPVTSEHELTCQAEGYPKAEVIWTSSD |
| | HQVLSGKTTTTNSKREEKLFNVTSTLRINTTTNEIFYCTFRRLDPEENHTAELVIPG |
| | NILNVSIKICLTLSPSTIGAVGIGIAVVMIFGMIFSMILCCAIRRNREMV |
| | (SEQ ID NO: 262) |
| hSecPDL1-CD81 | >Artificial Sequence; hSecPDL1-CD81, DNA |
| | ATGAGGATATTTGCTGTCTTTATATTCATGACCTACTGGCATTTGCTGAACGCATTT |
| | ACTGTCACGGTTCCCAAGGACCTATATGTGGTAGAGTATGGTAGCAATATGACAATT |
| | GAATGCAAATTCCCAGTAGAAAAACAATTAGACCTGGCTGCACTAATTGTCTATTGG |
| | GAAATGGAGGATAAGAACATTATTCAATTTGTGCATGGAGAGGAAGACCTGAAGGTT |
| | CAGCATAGTAGCTACAGACAGAGGGCCCGGCTGTTGAAGGACCAGCTCTCCCTGGGA |
| | AATGCTGCACTTCAGATCACAGATGTGAAATTGCAGGATGCAGGGGTGTACCGCTGC |
| | ATGATCAGCTATGGTGGTGCCGACTACAAGCGAATTACTGTGAAAGTCAATGCCCCA |
| | TACAACAAAATCAACCAAAGAATTTTGGTTGTGGATCCAGTCACCTCTGAACATGAA |
| | CTGACATGTCAGGCTGAGGGCTACCCCAAGGCCGAAGTCATCTGGACAAGCAGTGAC |
| | CATCAAGTCCTGAGTGGTAAGACCACCACCACCAATTCCAAGAGAGAGGAGAAGCTT |
| | TTCAATGTGACCAGCACACTGAGAATCAACACAACAACTAATGAGATTTTCTACTGC |
| | ACTTTTAGGAGATTAGATCCTGAGGAAAACCATACAGCTGAATTGGTCATCCCAGGT |
| | AATATTCTGAATGTGTCCATTAAAATATGTCTAACACTGTCCCCTAGCACCCTGTAC |
| | CTCATCGGCATTGCTGCCATCGTGGTCGCTGTGATCATGATCTTCGAGATGATCCTG |
| | AGCATGGTGCTGTGCTGTGGCATCCGGAACAGCTCCGTGTACTGA |
| | (SEQ ID NO: 263) |
| | >Artificial Sequence; hSecPDL1-CD81, Amino Acid |
| | MRIFAVFIFMTYWHLLNAFTVTVPKDLYVVEYGSNMTIECKFPVEKQLDLAALIVYW |
| | EMEDKNITQFVHGEEDLKVQHSSYRQRARLLKDQLSLGNAALQITDVKLQDAGVYRC |
| | MISYGGADYKRITVKVNAPYNKINQRILVVDPVTSEHELTCQAEGYPKAEVIWTSSD |
| | HQVLSGKTTTTNSKREEKLFNVTSTLRINTTTNEIFYCTFRRLDPEENHTAELVIPG |
| | NILNVSIKICLTLSPSTLYLIGIAAIVVAVIMIFEMILSMVLCCGIRNSSVY |
| | (SEQ ID NO: 264) |
| hCD200-Fc-GPI | >Artificial Sequence; hCD200-Fc-GPI, DNA |
| | ATGGAGAGGCTGGTGATCAGGATGCCCTTCTCTCATCTGTCTACCTACAGCCTGGTT |
| | TGGGTCATGGCAGCAGTGGTGCTGTGCACAGCACAAGTGCAAGTGGTGACCCAGGAT |
| | GAAAGAGAGCAGCTGTACACACCTGCTTCCTTAAAATGCTCTCTGCAAAATGCCCAG |
| | GAAGCCCTCATTGTGACATGGCAGAAAAAGAAAGCTGTAAGCCCAGAAAACATGGTC |
| | ACCTTCAGCGAGAACCATGGGGTGGTGATCCAGCCTGCCTATAAGGACAAGATAAAC |
| | ATTACCCAGCTGGGACTCCAAAACTCAACCATCACCTTCTGGAATATCACCCTGGAG |
| | GATGAAGGGTGTTACATGTGTCTCTTCAATACCTTTGGTTTTGGGAAGATCTCAGGA |
| | ACGGCCTGCCTCACCGTCTATGTACAGCCCATAGTATCCCTTCACTACAAATTCTCT |
| | GAAGACCACCTAAATATCACTTGCTCTGCCACTGCCCGCCCAGCCCCCATGGTCTTC |
| | TGGAAGGTCCCTCGGTCAGGGATTGAAAATAGTACAGTGACTCTGTCTCACCCAAAT |
| | GGGACCACGTCTGTTACCAGCATCCTCCATATCAAAGACCCTAAGAATCAGGTGGGG |
| | AAGGAGGTGATCTGCCAGGTGCTGCACCTGGGGACTGTGACCGACTTTAAGCAAACC |
| | GTCAACAAAGGCATCGATGACAAAACTCACACATGCCCACCGTGCCCAGCACCTGAA |
| | CTCCTGGGGGGACCGTCAGTCTTCCTCTTCCCCCCAAAACCCAAGGACACCCTCATG |
| | ATCTCCCGGACCCCTGAGGTCACATGCGTGGTGGTGGACGTGAGCCACGAAGACCCT |
| | GAGGTCAAGTTCAACTGGTACGTGGACGGCGTGGAGGTGCATAATGCCAAGACAAAG |
| | CCGCGGGAGGAGCAGTACAACAGCACGTACCGTGTGGTCAGCGTCCTCACCGTCCTG |
| | CACCAGGACTGGCTGAATGGCAAGGAGTACAAGTGCAAGGTCTCCAACAAAGCCCTC |
| | CCAGCCCCCATCGAGAAAACCATCTCCAAAGCCAAAGGGCAGCCCCGAGAACCACAG |
| | GTGTACACCCTGCCCCCATCCCGGGAGGAGATGACCAAGAACCAGGTCAGCCTGACC |
| | TGCCTGGTCAAAGGCTTCTATCCCAGCGACATCGCCGTGGAGTGGGAGAGCAATGGG |
| | CAGCCGGAGAACAACTACAAGACCACGCCTCCCGTGCTGGACTCCGACGGCTCCTTC |
| | TTCCTCTACAGCAAGCTCACCGTGGACAAGAGCAGGTGGCAGCAGGGGAACGTCTTC |
| | TCATGCTCCGTGATGCACGAGGCTCTGCACAACCACTACACGCAGAAGAGCCTCTCC |
| | CTGTCTCCGGGTAAAATCGATCCAAATAAAGGAAGTGGAACCACTTCAGGTACTACC |
| | CGTCTTCTATCTGGGCACACGTGTTTCACGTTGACAGGTTTGCTTGGGACGCTAGTA |
| | ACCATGGGCTTGCTGACTTAG |
| | (SEQ ID NO: 265) |
| | >Artificial Sequence; hCD200-Fc-GPI, Amino Acid |
| | MERLVIRMPFSHLSTYSLVWVMAAVVLCTAQVQVVTQDEREQLYTPASLKCSLQNAQ |
| | EALIVTWQKKKAVSPENMVTFSENHGVVIQPAYKDKINITQLGLQNSTITFWNITLE |
| | DEGCYMCLFNTFGFGKISGTACLTVYVQPIVSLHYKFSEDHLNITCSATARPAPMVF |
| | WKVPRSGIENSTVTLSHPNGTTSVTSILHIKDPKNQVGKEVICQVLHLGTVTDEKQT |
| | VNKGIDDKTHTCPPCPAPELLGGPSVFLFPPKPKDTLMISRTPEVTCVVVDVSHEDP |
| | EVKFNWYVDGVEVHNAKTKPREEQYNSTYRVVSVLTVLHQDWLNGKEYKCKVSNKAL |
| | PAPIEKTISKAKGQPREPQVYTLPPSREEMTKNQVSLTCLVKGFYPSDIAVEWESNG |
| | QPENNYKTTPPVLDSDGSFFLYSKLTVDKSRWQQGNVFSCSVMHEALHNHYTQKSLS |
| | LSPGKIDPNKGSGTTSGTTRLLSGHTCFTLTGLLGTLVTMGLLT |
| | (SEQ ID NO: 266) |
| hFGL1-GPI | >Artificial Sequence; hFGL1-GPI, DNA |
| | ATGGCAAAGGTGTTCAGTTTCATCCTTGTTACCACCGCTCTGACAATGGGCAGGGAA |
| | ATTTCGGCGCTCGAGGACTGTGCCCAGGAGCAGATGCGGCTCAGAGCCCAGGTGCGC |
| | CTGCTTGAGACCCGGGTCAAACAGCAACAGGTCAAGATCAAGCAGCTTTTGCAGGAG |
| | AATGAAGTCCAGTTCCTTGATAAAGGAGATGAGAATACTGTCATTGATCTTGGAAGC |
| | AAGAGGCAGTATGCAGATTGTTCAGAGATTTTCAATGATGGGTATAAGCTCAGTGGA |
| | TTTTACAAAATCAAACCTCTCCAGAGCCCAGCAGAATTTTCTGTTTATTGTGACATG |
| | TCCGATGGAGGAGGATGGACTGTAATTCAGAGACGATCTGATGGCAGTGAAAACTTT |
| | AACAGAGGATGGAAAGACTATGAAAATGGCTTTGGAAATTTTGTCCAAAAACATGGT |
| | GAATATTGGCTGGGCAATAAAAATCTTCACTTCTTGACCACTCAAGAAGACTACACT |
| | TTAAAAATCGACCTTGCAGATTTTGAAAAAAATAGCCGTTATGCACAATATAAGAAT |
| | TTCAAAGTTGGAGATGAAAAGAATTTCTACGAGTTGAATATTGGGGAATATTCTGGA |
| | ACAGCTGGAGATTCCCTTGCGGGGAATTTTCATCCTGAGGTGCAGTGGTGGGCTAGT |
| | CACCAAAGAATGAAATTCAGCACGTGGGACAGAGATCATGACAACTATGAAGGGAAC |
| | TGCGCAGAAGAAGATCAGTCTGGCTGGTGGTTTAACAGGTGTCACTCTGCAAACCTG |
| | AATGGTGTATACTACAGCGGCCCCTACACGGCTAAAACAGACAATGGGATTGTCTGG |
| | TACACCTGGCATGGGTGGTGGTATTCTCTGAAATCTGTGGTTATGAAAATTAGGCCA |
| | AATGATTTTATTCCAAATGTAATTCCAAATAAAGGAAGTGGAACCACTTCAGGTACT |
| | ACCCGTCTTCTATCTGGGCACACGTGTTTCACGTTGACAGGTTTGCTTGGGACGCTA |
| | GTAACCATGGGCTTGCTGACTTAG |
| | (SEQ ID NO: 267) |
| | >Artificial Sequence; hFGL1-GPI, Amino Acid |
| | MAKVFSFILVTTALTMGREISALEDCAQEQMRLRAQVRLLETRVKQQQVKIKQLLQE |
| | NEVQFLDKGDENTVIDLGSKRQYADCSEIFNDGYKLSGFYKIKPLQSPAEFSVYCDM |
| | SDGGGWTVIQRRSDGSENFNRGWKDYENGFGNFVQKHGEYWLGNKNLEFLTTQEDYT |
| | LKIDLADFEKNSRYAQYKNFKVGDEKNFYELNIGEYSGTAGDSLAGNFHPEVQWWAS |
| | HQRMKFSTWDRDEDNYEGNCAEEDQSGWWFNRCHSANLNGVYYSGPYTAKTDNGIVW |
| | YTWHGWWYSLKSVVMKIRPNDFIPNVIPNKGSGTTSGTTRLLSGHTCFTLTGLLGTL |
| | VTMGLLT |
| | (SEQ ID NO: 268) |
| hGal9-Fc-GPI | >Artificial Sequence; hGal9-Fc-GPI, DNA |
| | ATGGCCTTCAGCGGTTCCCAGGCTCCCTACCTGAGTCCAGCTGTCCCCTTTTCTGGG |
| | ACTATTCAAGGAGGTCTCCAGGACGGACTTCAGATCACTGTCAATGGGACCGTTCTC |
| | AGCTCCAGTGGAACCAGGTTTGCTGTGAACTTTCAGACTGGCTTCAGTGGAAATGAC |
| | ATTGCCTTCCACTTCAACCCTCGGTTTGAAGATGGAGGGTACGTGGTGTGCAACACG |
| | AGGCAGAACGGAAGCTGGGGGCCCGAGGAGAGGAAGACACACATGCCTTTCCAGAAG |
| | GGGATGCCCTTTGACCTCTGCTTCCTGGTGCAGAGCTCAGATTTCAAGGTGATGGTG |
| | AACGGGATCCTCTTCGTGCAGTACTTCCACCGCGTGCCCTTCCACCGTGTGGACACC |
| | ATCTCCGTCAATGGCTCTGTGCAGCTGTCCTACATCAGCTTCCAGAACCCCCGCACA |
| | GTCCCTGTTCAGCCTGCCTTCTCCACGGTGCCGTTCTCCCAGCCTGTCTGTTTCCCA |
| | CCCAGGCCCAGGGGGCGCAGACAAAAACCTCCCGGCGTGTGGCCTGCCAACCCGGCT |
| | CCCATTACCCAGACAGTCATCCACACAGTGCAGAGCGCCCCTGGACAGATGTTCTCT |
| | ACTCCCGCCATCCCACCTATGATGTACCCCCACCCCGCCTATCCGATGCCTTTCATC |
| | ACCACCATTCTGGGAGGGCTGTACCCATCCAAGTCCATCCTCCTGTCAGGCACTGTC |
| | CTGCCCAGTGCTCAGAGGTTCCACATCAACCTGTGCTCTGGGAACCACATCGCCTTC |
| | CACCTGAACCCCCGTTTTGATGAGAATGCTGTGGTCCGCAACACCCAGATCGACAAC |
| | TCCTGGGGGTCTGAGGAGCGAAGTCTGCCCCGAAAAATGCCCTTCGTCCGTGGCCAG |
| | AGCTTCTCAGTGTGGATCTTGTGTGAAGCTCACTGCCTCAAGGTGGCCGTGGATGGT |
| | CAGCACCTGTTTGAATACTACCATCGCCTGAGGAACCTGCCCACCATCAACAGACTG |
| | GAAGTGGGGGGCGACATCCAGCTGACCCATGTGCAGACAATCGATGACAAAACTCAC |
| | ACATGCCCACCGTGCCCAGCACCTGAACTCCTGGGGGGACCGTCAGTCTTCCTCTTC |
| | CCCCCAAAACCCAAGGACACCCTCATGATCTCCCGGACCCCTGAGGTCACATGCGTG |
| | GTGGTGGACGTGAGCCACGAAGACCCTGAGGTCAAGTTCAACTGGTACGTGGACGGC |
| | GTGGAGGTGCATAATGCCAAGACAAAGCCGCGGGAGGAGCAGTACAACAGCACGTAC |
| | CGTGTGGTCAGCGTCCTCACCGTCCTGCACCAGGACTGGCTGAATGGCAAGGAGTAC |
| | AAGTGCAAGGTCTCCAACAAAGCCCTCCCAGCCCCCATCGAGAAAACCATCTCCAAA |
| | GCCAAAGGGCAGCCCCGAGAACCACAGGTGTACACCCTGCCCCCATCCCGGGAGGAG |
| | ATGACCAAGAACCAGGTCAGCCTGACCTGCCTGGTCAAAGGCTTCTATCCCAGCGAC |
| | ATCGCCGTGGAGTGGGAGAGCAATGGGCAGCCGGAGAACAACTACAAGACCACGCCT |
| | CCCGTGCTGGACTCCGACGGCTCCTTCTTCCTCTACAGCAAGCTCACCGTGGACAAG |
| | AGCAGGTGGCAGCAGGGGAACGTCTTCTCATGCTCCGTGATGCACGAGGCTCTGCAC |
| | AACCACTACACGCAGAAGAGCCTCTCCCTGTCTCCGGGTAAAATCGATCCAAATAAA |
| | GGAAGTGGAACCACTTCAGGTACTACCCGTCTTCTATCTGGGCACACGTGTTTCACG |
| | TTGACAGGTTTGCTTGGGACGCTAGTAACCATGGGCTTGCTGACTTAG |
| | (SEQ ID NO: 269) |
| | >Artificial Sequence; hGal9-Fc-GPI, Amino Acid |
| | MAFSGSQAPYLSPAVPFSGTIQGGLQDGLQITVNGTVLSSSGTRFAVNFQTGFSGND |
| | IAFHFNPRFEDGGYVVCNTRQNGSWGPEERKTEMPFQKGMPFDLCFLVQSSDFKVMV |
| | NGILFVQYFERVPFERVDTISVNGSVQLSYISFQNPRTVPVQPAFSTVPFSQPVCFP |
| | PRPRGRRQKPPGVWPANPAPITQTVIHTVQSAPGQMFSTPAIPPMMYPHPAYPMPFI |
| | TTILGGLYPSKSILLSGTVLPSAQRFHINLCSGNHIAFHLNPRFDENAVVRNTQIDN |
| | SWGSEERSLPRKMPFVRGQSFSVWILCEAHCLKVAVDGQHLFEYYHRLRNLPTINRL |
| | EVGGDIQLTHVQTIDDKTHTCPPCPAPELLGGPSVFLFPPKPKDTLMISRTPEVTCV |
| | VVDVSHEDPEVKFNWYVDGVEVHNAKTKPREEQYNSTYRVVSVLTVLHQDWLNGKEY |
| | KCKVSNKALPAPIEKTISKAKGQPREPQVYTLPPSREEMTKNQVSLTCLVKGFYPSD |
| | IAVEWESNGQPENNYKTTPPVLDSDGSFFLYSKLTVDKSRWQQGNVFSCSVMHEALH |
| | NHYTQKSLSLSPGKIDPNKGSGTTSGTTRLLSGHTCFTLTGLLGTLVTMGLLT |
| | (SEQ ID NO: 270) |
| hCD200-GPI | >Artificial Sequence; hCD200-GPI, DNA |
| | ATGGAGAGGCTGGTGATCAGGATGCCCTTCTCTCATCTGTCTACCTACAGCCTGGTT |
| | TGGGTCATGGCAGCAGTGGTGCTGTGCACAGCACAAGTGCAAGTGGTGACCCAGGAT |
| | GAAAGAGAGCAGCTGTACACACCTGCTTCCTTAAAATGCTCTCTGCAAAATGCCCAG |
| | GAAGCCCTCATTGTGACATGGCAGAAAAAGAAAGCTGTAAGCCCAGAAAACATGGTC |
| | ACCTTCAGCGAGAACCATGGGGTGGTGATCCAGCCTGCCTATAAGGACAAGATAAAC |
| | ATTACCCAGCTGGGACTCCAAAACTCAACCATCACCTTCTGGAATATCACCCTGGAG |
| | GATGAAGGGTGTTACATGTGTCTCTTCAATACCTTTGGTTTTGGGAAGATCTCAGGA |
| | ACGGCCTGCCTCACCGTCTATGTACAGCCCATAGTATCCCTTCACTACAAATTCTCT |
| | GAAGACCACCTAAATATCACTTGCTCTGCCACTGCCCGCCCAGCCCCCATGGTCTTC |
| | TGGAAGGTCCCTCGGTCAGGGATTGAAAATAGTACAGTGACTCTGTCTCACCCAAAT |
| | GGGACCACGTCTGTTACCAGCATCCTCCATATCAAAGACCCTAAGAATCAGGTGGGG |
| | AAGGAGGTGATCTGCCAGGTGCTGCACCTGGGGACTGTGACCGACTTTAAGCAAACC |
| | GTCAACAAAGGCCCAAATAAAGGAAGTGGAACCACTTCAGGTACTACCCGTCTTCTA |
| | TCTGGGCACACGTGTTTCACGTTGACAGGTTTGCTTGGGACGCTAGTAACCATGGGC |
| | TTGCTGACTTAG |
| | (SEQ ID NO: 271) |
| | >Artificial Sequence; hCD200-GPI, Amino Acid |
| | MERLVIRMPFSHLSTYSLVWVMAAVVLCTAQVQVVTQDEREQLYTPASLKCSLQNAQ |
| | EALIVTWQKKKAVSPENMVTFSENHGVVIQPAYKDKINITQLGLQNSTITEWNITLE |
| | DEGCYMCLENTFGEGKISGTACLTVYVQPIVSLHYKESEDHLNITCSATARPAPMVF |
| | WEVPRSGIENSTVTLSHPNGTTSVTSILHIKDPKNQVGKEVICQVLHLGTVTDFKQT |
| | VNKGPNKGSGTTSGTTRLLSGHTCFTLTGLLGTLVTMGLLT |
| | (SEQ ID NO: 272) |
| hGal9-GPI | >Artificial Sequence; hGal9-GPI, DNA |
| | ATGGCCTTCAGCGGTTCCCAGGCTCCCTACCTGAGTCCAGCTGTCCCCTTTTCTGGG |
| | ACTATTCAAGGAGGTCTCCAGGACGGACTTCAGATCACTGTCAATGGGACCGTTCTC |
| | AGCTCCAGTGGAACCAGGTTTGCTGTGAACTTTCAGACTGGCTTCAGTGGAAATGAC |
| | ATTGCCTTCCACTTCAACCCTCGGTTTGAAGATGGAGGGTACGTGGTGTGCAACACG |
| | AGGCAGAACGGAAGCTGGGGGCCCGAGGAGAGGAAGACACACATGCCTTTCCAGAAG |
| | GGGATGCCCTTTGACCTCTGCTTCCTGGTGCAGAGCTCAGATTTCAAGGTGATGGTG |
| | AACGGGATCCTCTTCGTGCAGTACTTCCACCGCGTGCCCTTCCACCGTGTGGACACC |
| | ATCTCCGTCAATGGCTCTGTGCAGCTGTCCTACATCAGCTTCCAGAACCCCCGCACA |
| | GTCCCTGTTCAGCCTGCCTTCTCCACGGTGCCGTTCTCCCAGCCTGTCTGTTTCCCA |
| | CCCAGGCCCAGGGGGCGCAGACAAAAACCTCCCGGCGTGTGGCCTGCCAACCCGGCT |
| | CCCATTACCCAGACAGTCATCCACACAGTGCAGAGCGCCCCTGGACAGATGTTCTCT |
| | ACTCCCGCCATCCCACCTATGATGTACCCCCACCCCGCCTATCCGATGCCTTTCATC |
| | ACCACCATTCTGGGAGGGCTGTACCCATCCAAGTCCATCCTCCTGTCAGGCACTGTC |
| | CTGCCCAGTGCTCAGAGGTTCCACATCAACCTGTGCTCTGGGAACCACATCGCCTTC |
| | CACCTGAACCCCCGTTTTGATGAGAATGCTGTGGTCCGCAACACCCAGATCGACAAC |
| | TCCTGGGGGTCTGAGGAGCGAAGTCTGCCCCGAAAAATGCCCTTCGTCCGTGGCCAG |
| | AGCTTCTCAGTGTGGATCTTGTGTGAAGCTCACTGCCTCAAGGTGGCCGTGGATGGT |
| | CAGCACCTGTTTGAATACTACCATCGCCTGAGGAACCTGCCCACCATCAACAGACTG |
| | GAAGTGGGGGGCGACATCCAGCTGACCCATGTGCAGACACCAAATAAAGGAAGTGGA |
| | ACCACTTCAGGTACTACCCGTCTTCTATCTGGGCACACGTGTTTCACGTTGACAGGT |
| | TTGCTTGGGACGCTAGTAACCATGGGCTTGCTGACTTAG |
| | (SEQ ID NO: 273) |
| | >Artificial Sequence; hGal9-GPI, Amino Acid |
| | MAFSGSQAPYLSPAVPFSGTIQGGLQDGLQITVNGTVLSSSGTRFAVNFQTGFSGND |
| | IAFHFNPRFEDGGYVVCNTRQNGSWGPEERKTEMPFQKGMPFDLCFLVQSSDFKVMV |
| | NGILFVQYFHRVPFHRVDTISVNGSVQLSYISFQNPRTVPVQPAFSTVPFSQPVCFP |
| | PRPRGRRQKPPGVWPANPAPITQTVIHTVQSAPGQMFSTPAIPPMMYPHPAYPMPFI |
| | TTILGGLYPSKSILLSGTVLPSAQRFHINLCSGNHIAFHLNPRFDENAVVRNTQIDN |
| | SWGSEERSLPRKMPFVRGQSFSVWILCEAHCLKVAVDGQHLFEYYHRLRNLPTINRL |
| | EVGGDIQLTHVQTPNKGSGTTSGTTRLLSGHTCFTLTGLLGTLVTMGLLT |
| | (SEQ ID NO: 274) |
| hHVEM-GPI | >Artificial Sequence; hHVEM-GPI, DNA |
| | [symbol] [symbol] [symbol] [symbol] [symbol] |
| | [symbol] [symbol] [symbol] [symbol] [symbol] |
| | [symbol] [symbol] [symbol] [symbol] [symbol] |
| | [symbol] [symbol] [symbol] [symbol] [symbol] |
| | [symbol] [symbol] [symbol] [symbol] [symbol] |
| | [symbol] [symbol] [symbol] [symbol] [symbol] |
| | [symbol] [symbol] [symbol] [symbol] [symbol] |
| | [symbol] [symbol] [symbol] [symbol] [symbol] |
| | [symbol] [symbol] [symbol] [symbol] [symbol] |
| | [symbol] [symbol] [symbol] [symbol] [symbol] |
| | [symbol] [symbol] [symbol] CCAAATAAAGGAAGTGGAACC |
| | ACTTCAGGTACTACCCGTCTTCTATCTGGGCACACGTGTTTCACGTTGACAGGTTTG |
| | CTTGGGACGCTAGTAACCATGGGCTTGCTGACTTAG |
| | (SEQ ID NO: 275) |
| | >Artificial Sequence; hHVEM-GPI, Amino Acid |
| | MEPPGDWGPPPWRSTPKTDVLRLVLYLTFLGAPCYAPALPSCKEDEYPVGSECCPKC |
| | SPGYRVKEACGELTGTVCEPCPPGTYIAHLNGLSKCLQCQMCDPAMGLRASRNCSRT |
| | ENAVCGCSPGHFCIVQDGDHCAACRAYATSSPGQRVQKGGTESQDTLCQNCPPGTFS |
| | PNGTLEECQHQTKCSWLVTKAGAGTSSSHWVPNKGSGTTSGTTRLLSGHTCFTLTGL |
| | LGTLVTMGLLT |
| | (SEQ ID NO: 276) |
| hPDL2-GPI | >Artificial Sequence; hPDL2-GPI, DNA |
| | ATGATCTTCCTCCTGCTAATGTTGAGCCTGGAATTGCAGCTTCACCAGATAGCAGCT |
| | TTATTCACAGTGACAGTCCCTAAGGAACTGTACATAATAGAGCATGGCAGCAATGTG |
| | ACCCTGGAATGCAACTTTGACACTGGAAGTCATGTGAACCTTGGAGCAATAACAGCC |
| | AGTTTGCAAAAGGTGGAAAATGATACATCCCCACACCGTGAAAGAGCCACTTTGCTG |
| | GAGGAGCAGCTGCCCCTAGGGAAGGCCTCGTTCCACATACCTCAAGTCCAAGTGAGG |
| | GACGAAGGACAGTACCAATGCATAATCATCTATGGGGTCGCCTGGGACTACAAGTAC |
| | CTGACTCTGAAAGTCAAAGCTTCCTACAGGAAAATAAACACTCACATCCTAAAGGTT |
| | CCAGAAACAGATGAGGTAGAGCTCACCTGCCAGGCTACAGGTTATCCTCTGGCAGAA |
| | GTATCCTGGCCAAACGTCAGCGTTCCTGCCAACACCAGCCACTCCAGGACCCCTGAA |
| | GGCCTCTACCAGGTCACCAGTGTTCTGCGCCTAAAGCCACCCCCTGGCAGAAACTTC |
| | AGCTGTGTGTTCTGGAATACTCACGTGAGGGAACTTACTTTGGCCAGCATTGACCTT |
| | CAAAGTCAGATGGAACCCAGGACCCATCCAACTCCAAATAAAGGAAGTGGAACCACT |
| | TCAGGTACTACCCGTCTTCTATCTGGGCACACGTGTTTCACGTTGACAGGTTTGCTT |
| | GGGACGCTAGTAACCATGGGCTTGCTGACTTAG |
| | (SEQ ID NO: 277) |
| | >Artificial Sequence; hPDL2-GPI, Amino Acid |
| | MIELLLMLSLELQLHQIAALFTVTVPKELYIIEHGSNVTLECNFDTGSHVNLGAITA |
| | SLQKVENDTSPHRERATLLEEQLPLGKASFHIPQVQVRDEGQYQCIIIYGVAWDYKY |
| | LTLKVKASYRKINTHILKVPETDEVELTCQATGYPLAEVSWPNVSVPANTSHSRTPE |
| | GLYQVTSVLRLKPPPGRNFSCVFWNTHVRELTLASIDLQSQMEPRTHPTPNKGSGTT |
| | SGTTRLLSGHTCFTLTGLLGTLVTMGLLT |
| | (SEQ ID NO: 278) |
| hTSG6-GPI | >Artificial Sequence; hTSG6-GPI, DNA |
| | ATGATCATCTTAATTTACTTATTTCTCTTGCTATGGGAAGACACTCAAGGATGGGGA |
| | TTCAAGGATGGAATTTTTCATAACTCCATATGGCTTGAACGAGCAGCCGGTGTGTAC |
| | CACAGAGAAGCACGGTCTGGCAAATACAAGCTCACCTACGCAGAAGCTAAGGCGGTG |
| | TGTGAATTTGAAGGCGGCCATCTCGCAACTTACAAGCAGCTAGAGGCAGCCAGAAAA |
| | ATTGGATTTCATGTCTGTGCTGCTGGATGGATGGCTAAGGGCAGAGTTGGATACCCC |
| | ATTGTGAAGCCAGGGCCCAACTGTGGATTTGGAAAAACTGGCATTATTGATTATGGA |
| | ATCCGTCTCAATAGGAGTGAAAGATGGGATGCCTATTGCTACAACCCACACGCAAAG |
| | GAGTGTGGTGGCGTCTTTACAGATCCAAAGCAAATTTTTAAATCTCCAGGCTTCCCA |
| | AATGAGTACGAAGATAACCAAATCTGCTACTGGCACATTAGACTCAAGTATGGTCAG |
| | CGTATTCACCTGAGTTTTTTAGATTTTGACCTTGAAGATGACCCAGGTTGCTTGGCT |
| | GATTATGTTGAAATATATGACAGTTACGATGATGTCCATGGCTTTGTGGGAAGATAC |
| | TGTGGAGATGAGCTTCCAGATGACATCATCAGTACAGGAAATGTCATGACCTTGAAG |
| | TTTCTAAGTGATGCTTCAGTGACAGCTGGAGGTTTCCAAATCAAATATGTTGCAATG |
| | GATCCTGTATCCAAATCCAGTCAAGGAAAAAATACAAGTACTACTTCTACTGGAAAT |
| | AAAAACTTTTTAGCTGGAAGATTTAGCCACTTAATCGATCCAAATAAAGGAAGTGGA |
| | ACCACTTCAGGTACTACCCGTCTTCTATCTGGGCACACGTGTTTCACGTTGACAGGT |
| | TTGCTTGGGACGCTAGTAACCATGGGCTTGCTGACTTAG |
| | (SEQ ID NO: 279) |
| | >Artificial Sequence; hTSG6-GPI, Amino Acid |
| | MIILIYLELLLWEDTQGWGEKDGIFHNSIWLERAAGVYHREARSGKYKLTYAEAKAV |
| | CEFEGGHLATYKQLEAARKIGFHVCAAGWMAKGRVGYPIVKPGPNCGEGKTGIIDYG |
| | IRLNRSERWDAYCYNPHAKECGGVFTDPKQIFKSPGFPNEYEDNQICYWHIRLKYGQ |
| | RIHLSFLDFDLEDDPGCLADYVEIYDSYDDVHGFVGRYCGDELPDDIISTGNVMTLK |
| | FLSDASVTAGGFQIKYVAMDPVSKSSQGKNTSTTSTGNKNFLAGRFSHLIDPNKGSG |
| | TTSGTTRLLSGHTCFTLTGLLGTLVTMGLLT |
| | (SEQ ID NO: 280) |
| hHVEM-Fc-GPI | >Artificial Sequence; hHVEM-Fc-GPI, DNA |
| | ATGGAGCCTCCTGGAGACTGGGGGCCTCCTCCCTGGAGATCCACCCCCAAAACCGAC |
| | GTCTTGAGGCTGGTGCTGTATCTCACCTTCCTGGGAGCCCCCTGCTACGCCCCAGCT |
| | CTGCCGTCCTGCAAGGAGGACGAGTACCCAGTGGGCTCCGAGTGCTGCCCCAAGTGC |
| | AGTCCAGGTTATCGTGTGAAGGAGGCCTGCGGGGAGCTGACGGGCACAGTGTGTGAA |
| | CCCTGCCCTCCAGGCACCTACATTGCCCACCTCAATGGCCTAAGCAAGTGTCTGCAG |
| | TGCCAAATGTGTGACCCAGCCATGGGCCTGCGCGCGAGCCGGAACTGCTCCAGGACA |
| | GAGAACGCCGTGTGTGGCTGCAGCCCAGGCCACTTCTGCATCGTCCAGGACGGGGAC |
| | CACTGCGCCGCGTGCCGCGCTTACGCCACCTCCAGCCCGGGCCAGAGGGTGCAGAAG |
| | GGAGGCACCGAGAGTCAGGACACCCTGTGTCAGAACTGCCCCCCGGGGACCTTCTCT |
| | CCCAATGGGACCCTGGAGGAATGTCAGCACCAGACCAAGTGCAGCTGGCTGGTGACG |
| | AAGGCCGGAGCTGGGACCAGCAGCTCCCACTGGGTAATCGATGACAAAACTCACACA |
| | TGCCCACCGTGCCCAGCACCTGAACTCCTGGGGGGACCGTCAGTCTTCCTCTTCCCC |
| | CCAAAACCCAAGGACACCCTCATGATCTCCCGGACCCCTGAGGTCACATGCGTGGTG |
| | GTGGACGTGAGCCACGAAGACCCTGAGGTCAAGTTCAACTGGTACGTGGACGGCGTG |
| | GAGGTGCATAATGCCAAGACAAAGCCGCGGGAGGAGCAGTACAACAGCACGTACCGT |
| | GTGGTCAGCGTCCTCACCGTCCTGCACCAGGACTGGCTGAATGGCAAGGAGTACAAG |
| | TGCAAGGTCTCCAACAAAGCCCTCCCAGCCCCCATCGAGAAAACCATCTCCAAAGCC |
| | AAAGGGCAGCCCCGAGAACCACAGGTGTACACCCTGCCCCCATCCCGGGAGGAGATG |
| | ACCAAGAACCAGGTCAGCCTGACCTGCCTGGTCAAAGGCTTCTATCCCAGCGACATC |
| | GCCGTGGAGTGGGAGAGCAATGGGCAGCCGGAGAACAACTACAAGACCACGCCTCCC |
| | GTGCTGGACTCCGACGGCTCCTTCTTCCTCTACAGCAAGCTCACCGTGGACAAGAGC |
| | AGGTGGCAGCAGGGGAACGTCTTCTCATGCTCCGTGATGCACGAGGCTCTGCACAAC |
| | CACTACACGCAGAAGAGCCTCTCCCTGTCTCCGGGTAAAATCGATCCAAATAAAGGA |
| | AGTGGAACCACTTCAGGTACTACCCGTCTTCTATCTGGGCACACGTGTTTCACGTTG |
| | ACAGGTTTGCTTGGGACGCTAGTAACCATGGGCTTGCTGACTTAG |
| | (SEQ ID NO: 281) |
| | >Artificial Sequence; hHVEM-Fc-GPI, Amino Acid |
| | MEPPGDWGPPPWRSTPKTDVLRLVLYLTFLGAPCYAPALPSCKEDEYPVGSECCPKC |
| | SPGYRVKEACGELTGTVCEPCPPGTYIAHLNGLSKCLQCQMCDPAMGLRASRNCSRT |
| | ENAVCGCSPGHFCIVQDGDHCAACRAYATSSPGQRVQKGGTESQDTLCQNCPPGTES |
| | PNGTLEECQHQTKCSWLVTKAGAGTSSSHWVIDDKTHTCPPCPAPELLGGPSVFLFP |
| | PKPKDTLMISRTPEVTCVVVDVSHEDPEVKFNWYVDGVEVHNAKTKPREEQYNSTYR |
| | VVSVLTVLHQDWLNGKEYKCKVSNKALPAPIEKTISKAKGQPREPQVYTLPPSREEM |
| | TKNQVSLICLVKGFYPSDIAVEWESNGQPENNYKTIPPVLDSDGSFFLYSKLTVDKS |
| | RWQQGNVESCSVMHEALHNHYTQKSLSLSPGKIDPNKGSGTTSGTTRLLSGHTCFTL |
| | TGLLGTLVTMGLLT |
| | (SEQ ID NO: 282) |
| hPDL1-GPI-P2A- | >Artificial Sequence; hPDL1-GPI-P2A-hHVEM-GPI, DNA |
| hHVEM-GPI | ATGAGGATATTTGCTGTCTTTATATTCATGACCTACTGGCATTTGCTGAACGCATTT |
| | ACTGTCACGGTTCCCAAGGACCTATATGTGGTAGAGTATGGTAGCAATATGACAATT |
| | GAATGCAAATTCCCAGTAGAAAAACAATTAGACCTGGCTGCACTAATTGTCTATTGG |
| | GAAATGGAGGATAAGAACATTATTCAATTTGTGCATGGAGAGGAAGACCTGAAGGTT |
| | CAGCATAGTAGCTACAGACAGAGGGCCCGGCTGTTGAAGGACCAGCTCTCCCTGGGA |
| | AATGCTGCACTTCAGATCACAGATGTGAAATTGCAGGATGCAGGGGTGTACCGCTGC |
| | ATGATCAGCTATGGTGGTGCCGACTACAAGCGAATTACTGTGAAAGTCAATGCCCCA |
| | TACAACAAAATCAACCAAAGAATTTTGGTTGTGGATCCAGTCACCTCTGAACATGAA |
| | CTGACATGTCAGGCTGAGGGCTACCCCAAGGCCGAAGTCATCTGGACAAGCAGTGAC |
| | CATCAAGTCCTGAGTGGTAAGACCACCACCACCAATTCCAAGAGAGAGGAGAAGCTT |
| | TTCAATGTGACCAGCACACTGAGAATCAACACAACAACTAATGAGATTTTCTACTGC |
| | ACTTTTAGGAGATTAGATCCTGAGGAAAACCATACAGCTGAATTGGTCATCCCAGAA |
| | CTACCTCTGGCACATCCTCCAAATGAAAGGCCAAATAAAGGAAGTGGAACCACTTCA |
| | GGTACTACCCGTCTTCTATCTGGGCACACGTGTTTCACGTTGACAGGTTTGCTTGGG |
| | ACGCTAGTAACCATGGGCTTGCTGACTGGAAGCGGAGCTACTAACTTCAGCCTGCTG |
| | AAGCAGGCTGGCGACGTGGAGGAGAACCCTGGACCTATGGAGCCTCCTGGAGACTGG |
| | GGGCCTCCTCCCTGGAGATCCACCCCCAAAACCGACGTCTTGAGGCTGGTGCTGTAT |
| | CTCACCTTCCTGGGAGCCCCCTGCTACGCCCCAGCTCTGCCGTCCTGCAAGGAGGAC |
| | GAGTACCCAGTGGGCTCCGAGTGCTGCCCCAAGTGCAGTCCAGGTTATCGTGTGAAG |
| | GAGGCCTGCGGGGAGCTGACGGGCACAGTGTGTGAACCCTGCCCTCCAGGCACCTAC |
| | ATTGCCCACCTCAATGGCCTAAGCAAGTGTCTGCAGTGCCAAATGTGTGACCCAGCC |
| | ATGGGCCTGCGCGCGAGCCGGAACTGCTCCAGGACAGAGAACGCCGTGTGTGGCTGC |
| | AGCCCAGGCCACTTCTGCATCGTCCAGGACGGGGACCACTGCGCCGCGTGCCGCGCT |
| | TACGCCACCTCCAGCCCGGGCCAGAGGGTGCAGAAGGGAGGCACCGAGAGTCAGGAC |
| | ACCCTGTGTCAGAACTGCCCCCCGGGGACCTTCTCTCCCAATGGGACCCTGGAGGAA |
| | TGTCAGCACCAGACCAAGTGCAGCTGGCTGGTGACGAAGGCCGGAGCTGGGACCAGC |
| | AGCTCCCACTGGGTACCAAATAAAGGAAGTGGAACCACTTCAGGTACTACCCGTCTT |
| | CTATCTGGGCACACGTGTTTCACGTTGACAGGTTTGCTTGGGACGCTAGTAACCATG |
| | GGCTTGCTGACTTAG |
| | (SEQ ID NO: 283) |
| | >Artificial Sequence; hPDL1-GPI-P2A-hHVEM-GPI, Amino Acid |
| | MRIFAVFIFMTYWHLLNAFTVTVPKDLYVVEYGSNMTIECKFPVEKQLDLAALIVYW |
| | EMEDKNITQFVHGEEDLKVQHSSYRQRARLLKDQLSLGNAALQITDVKLQDAGVYRC |
| | MISYGGADYKRITVKVNAPYNKINQRILVVDPVTSEHELTCQAEGYPKAEVIWTSSD |
| | HQVLSGKTTTTNSKREEKLFNVTSTLRINTTTNEIFYCTERRLDPEENHTAELVIPE |
| | LPLAHPPNERPNKGSGTTSGTTRLLSGHTCFTLTGLLGTLVTMGLLTGSGATNFSLL |
| | KQAGDVEENPGPMEPPGDWGPPPWRSTPKTDVLRLVLYLTFLGAPCYAPALPSCKED |
| | EYPVGSECCPKCSPGYRVKEACGELTGTVCEPCPPGTYIAHLNGLSKCLQCQMCDPA |
| | MGLRASRNCSRTENAVCGCSPGHFCIVQDGDHCAACRAYATSSPGQRVQKGGTESQD |
| | TLCQNCPPGTESPNGTLEECQHQTKCSWLVTKAGAGTSSSHWVPNKGSGTTSGTTRL |
| | LSGHTCFTLTGLLGTLVTMGLLT |
| | (SEQ ID NO: 284) |
| mCTLA4-Fc-GPI | >Artificial Sequence; mCTLA4-Fc-GPI, DNA |
| | ATGGCTTGTCTTGGACTCCGGAGGTACAAAGCTCAACTGCAGCTGCCTTCTAGGACT |
| | TGGCCTTTTGTAGCCCTGCTCACTCTTCTTTTCATCCCAGTCTTCTCTGAAGCCATA |
| | CAGGTGACCCAACCTTCAGTGGTGTTGGCTAGCAGCCATGGTGTCGCCAGCTTTCCA |
| | TGTGAATATTCACCATCACACAACACTGATGAGGTCCGGGTGACTGTGCTGCGGCAG |
| | ACAAATGACCAAATGACTGAGGTCTGTGCCACGACATTCACAGAGAAGAATACAGTG |
| | GGCTTCCTAGATTACCCCTTCTGCAGTGGTACCTTTAATGAAAGCAGAGTGAACCTC |
| | ACCATCCAAGGACTGAGAGCTGTTGACACGGGACTGTACCTCTGCAAGGTGGAACTC |
| | ATGTACCCACCGCCATACTTTGTGGGCATGGGCAACGGGACGCAGATTTATGTCATT |
| | GATCCAGAACCATGCCCGGATTCTGAATCGATGACAAAACTCACACATGCCCACCGT |
| | GCCCAGCACCTGAACTCCTGGGGGGACCGTCAGTCTTCCTCTTCCCCCCAAAACCCA |
| | AGGACACCCTCATGATCTCCCGGACCCCTGAGGTCACATGCGTGGTGGTGGACGTGA |
| | GCCACGAAGACCCTGAGGTCAAGTTCAACTGGTACGTGGACGGCGTGGAGGTGCATA |
| | ATGCCAAGACAAAGCCGCGGGAGGAGCAGTACAACAGCACGTACCGTGTGGTCAGCG |
| | TCCTCACCGTCCTGCACCAGGACTGGCTGAATGGCAAGGAGTACAAGTGCAAGGTCT |
| | CCAACAAAGCCCTCCCAGCCCCCATCGAGAAAACCATCTCCAAAGCCAAAGGGCAGC |
| | CCCGAGAACCACAGGTGTACACCCTGCCCCCATCCCGGGAGGAGATGACCAAGAACC |
| | AGGTCAGCCTGACCTGCCTGGTCAAAGGCTTCTATCCCAGCGACATCGCCGTGGAGT |
| | GGGAGAGCAATGGGCAGCCGGAGAACAACTACAAGACCACGCCTCCCGTGCTGGACT |
| | CCGACGGCTCCTTCTTCCTCTACAGCAAGCTCACCGTGGACAAGAGCAGGTGGCAGC |
| | AGGGGAACGTCTTCTCATGCTCCGTGATGCACGAGGCTCTGCACAACCACTACACGC |
| | AGAAGAGCCTCTCCCTGTCTCCGGGTAAAATCGATCCAAATAAAGGAAGTGGAACCA |
| | CTTCAGGTACTACCCGTCTTCTATCTGGGCACACGTGTTTCACGTTGACAGGTTTGC |
| | TTGGGACGCTAGTAACCATGGGCTTGCTGACTTAG |
| | (SEQ ID NO: 285) |
| | >Artificial Sequence; mCTLA4-Fc-GPI, Amino Acid |
| | MACLGLRRYKAQLQLPSRTWPFVALLTLLFIPVESEAIQVTQPSVVLASSHGVASFP |
| | CEYSPSHNTDEVRVTVLRQTNDQMTEVCATTFTEKNTVGFLDYPFCSGTFNESRVNL |
| | TIQGLRAVDTGLYLCKVELMYPPPYFVGMGNGTQIYVIDPEPCPDSD |
| | IDDKTHTCPPCPAPELLGGPSVFLFPPKPKDTLMISRTPEVTCVVVDVSHEDPEVKF |
| | NWYVDGVEVHNAKTKPREEQYNSTYRVVSVLTVLHQDWLNGKEYKCKVSNKALPAPI |
| | EKTISKAKGQPREPQVYTLPPSREEMTKNQVSLTCLVKGFYPSDIAVEWESNGQPEN |
| | NYKTTPPVLDSDGSFFLYSKLTVDKSRWQQGNVFSCSVMHEALHNHYTQKSLSLSPG |
| | KIDPNKGSGTTSGTTRLLSGHTCFTLTGLLGTLVTMGLLT |
| | (SEQ ID NO: 286) |
| mPDL1-C1C2 | >Artificial Sequence; mPDL1-C1C2, DNA |
| | ATGAGGATATTTGCTGGCATTATATTCACAGCCTGCTGTCACTTGCTACGGGCGTTT |
| | ACTATCACGGCTCCAAAGGACTTGTACGTGGTGGAGTATGGCAGCAACGTCACGATG |
| | GAGTGCAGATTCCCTGTAGAACGGGAGCTGGACCTGCTTGCGTTAGTGGTGTACTGG |
| | GAAAAGGAAGATGAGCAAGTGATTCAGTTTGTGGCAGGAGAGGAGGACCTTAAGCCT |
| | CAGCACAGCAACTTCAGGGGGAGAGCCTCGCTGCCAAAGGACCAGCTTTTGAAGGGA |
| | AATGCTGCCCTTCAGATCACAGACGTCAAGCTGCAGGACGCAGGCGTTTACTGCTGC |
| | ATAATCAGCTACGGTGGTGCGGACTACAAGCGAATCACGCTGAAAGTCAATGCCCCA |
| | TACCGCAAAATCAACCAGAGAATTTCCGTGGATCCAGCCACTTCTGAGCATGAACTA |
| | ATATGTCAGGCCGAGGGTTATCCAGAAGCTGAGGTAATCTGGACAAACAGTGACCAC |
| | CAACCCGTGAGTGGGAAGAGAAGTGTCACCACTTCCCGGACAGAGGGGATGCTTCTC |
| | AATGTGACCAGCAGTCTGAGGGTCAACGCCACAGCGAATGATGTTTTCTACTGTACG |
| | TTTTGGAGATCACAGCCAGGGCAAAACCACACAGCGGAGCTGATCATCCCAGAACTG |
| | CCTGCAACACATCCTCCACAGAACAGGACTATCGATGTCGAGCCACTGGGCATGGAG |
| | AATGGGAACATTGCCAACTCACAGATCGCCGCCTCATCTGTGCGTGTGACCTTCTTG |
| | GGTTTGCAGCATTGGGTCCCGGAGCTGGCCCGCCTGAACCGCGCAGGCATGGTCAAT |
| | GCCTGGACACCCAGCAGCAATGACGATAACCCCTGGATCCAGGTGAACCTGCTGCGG |
| | AGGATGTGGGTAACAGGTGTGGTGACGCAGGGTGCCAGCCGCTTGGCCAGTCATGAG |
| | TACCTGAAGGCCTTCAAGGTGGCCTACAGCCTTAATGGACACGAATTCGATTTCATC |
| | CATGATGTTAATAAAAAACACAAGGAGTTTGTGGGTAACTGGAACAAAAACGCGGTG |
| | CATGTCAACCTGTTTGAGACCCCTGTGGAGGCTCAGTACGTGAGATTGTACCCCACG |
| | AGCTGCCACACGGCCTGCACTCTGCGCTTTGAGCTACTGGGCTGTGAGCTGAACGGA |
| | TGCGCCAATCCCCTGGGCCTGAAGAATAACAGCATCCCTGACAAGCAGATCACGGCC |
| | TCCAGCAGCTACAAGACCTGGGGCTTGCATCTCTTCAGCTGGAACCCCTCCTATGCA |
| | CGGCTGGACAAGCAGGGCAACTTCAACGCCTGGGTTGCGGGGAGCTACGGTAACGAT |
| | CAGTGGCTGCAGATCTTCCCTGGCAACTGGGACAACCACTCCCACAAGAAGAACTTG |
| | TTTGAGACGCCCATCCTGGCTCGCTATGTGCGCATCCTGCCTGTAGCCTGGCACAAC |
| | CGCATCGCCCTGCGCCTGGAGCTGCTGGGCTGTTAG |
| | (SEQ ID NO: 287) |
| | >Artificial Sequence; mPDL1-C1C2, Amino Acid |
| | MRIFAGIIFTACCHLLRAFTITAPKDLYVVEYGSNVTMECREPVERELDLLALVVYW |
| | EKEDEQVIQFVAGEEDLKPQHSNERGRASLPKDQLLKGNAALQITDVKLQDAGVYCC |
| | IISYGGADYKRITLKVNAPYRKINQRISVDPATSEHELICQAEGYPEAEVIWTNSDH |
| | QPVSGKRSVTTSRTEGMLLNVTSSLRVNATANDVEYCTEWRSQPGQNHTAELIIPEL |
| | PATHPPQNRTIDVEPLGMENGNIANSQIAASSVRVTFLGLQHWVPELARLNRAGMVN |
| | AWTPSSNDDNPWIQVNLLRRMWVTGVVTQGASRLASHEYLKAFKVAYSLNGHEFDFI |
| | HDVNKKHKEFVGNWNKNAVHVNLFETPVEAQYVRLYPTSCHTACTLRFELLGCELNG |
| | CANPLGLKNNSIPDKQITASSSYKTWGLHIFSWNPSYARLDKQGNFNAWVAGSYGND |
| | QWLQIFPGNWDNHSHKKNLFETPILARYVRILPVAWHNRIALRLELLGC |
| | (SEQ ID NO: 288) |
| mPDL1-Fc-GPI | >Artificial Sequence; mPDL1-Fc-GPI, DNA |
| | ATGAGGATATTTGCTGGCATTATATTCACAGCCTGCTGTCACTTGCTACGGGCGTTT |
| | ACTATCACGGCTCCAAAGGACTTGTACGTGGTGGAGTATGGCAGCAACGTCACGATG |
| | GAGTGCAGATTCCCTGTAGAACGGGAGCTGGACCTGCTTGCGTTAGTGGTGTACTGG |
| | GAAAAGGAAGATGAGCAAGTGATTCAGTTTGTGGCAGGAGAGGAGGACCTTAAGCCT |
| | CAGCACAGCAACTTCAGGGGGAGAGCCTCGCTGCCAAAGGACCAGCTTTTGAAGGGA |
| | AATGCTGCCCTTCAGATCACAGACGTCAAGCTGCAGGACGCAGGCGTTTACTGCTGC |
| | ATAATCAGCTACGGTGGTGCGGACTACAAGCGAATCACGCTGAAAGTCAATGCCCCA |
| | TACCGCAAAATCAACCAGAGAATTTCCGTGGATCCAGCCACTTCTGAGCATGAACTA |
| | ATATGTCAGGCCGAGGGTTATCCAGAAGCTGAGGTAATCTGGACAAACAGTGACCAC |
| | CAACCCGTGAGTGGGAAGAGAAGTGTCACCACTTCCCGGACAGAGGGGATGCTTCTC |
| | AATGTGACCAGCAGTCTGAGGGTCAACGCCACAGCGAATGATGTTTTCTACTGTACG |
| | TTTTGGAGATCACAGCCAGGGCAAAACCACACAGCGGAGCTGATCATCCCAGAACTG |
| | CCTGCAACACATCCTCCACAGAACAGGACTATCGATGACAAAACTCACACATGCCCA |
| | CCGTGCCCAGCACCTGAACTCCTGGGGGGACCGTCAGTCTTCCTCTTCCCCCCAAAA |
| | CCCAAGGACACCCTCATGATCTCCCGGACCCCTGAGGTCACATGCGTGGTGGTGGAC |
| | GTGAGCCACGAAGACCCTGAGGTCAAGTTCAACTGGTACGTGGACGGCGTGGAGGTG |
| | CATAATGCCAAGACAAAGCCGCGGGAGGAGCAGTACAACAGCACGTACCGTGTGGTC |
| | AGCGTCCTCACCGTCCTGCACCAGGACTGGCTGAATGGCAAGGAGTACAAGTGCAAG |
| | GTCTCCAACAAAGCCCTCCCAGCCCCCATCGAGAAAACCATCTCCAAAGCCAAAGGG |
| | CAGCCCCGAGAACCACAGGTGTACACCCTGCCCCCATCCCGGGAGGAGATGACCAAG |
| | AACCAGGTCAGCCTGACCTGCCTGGTCAAAGGCTTCTATCCCAGCGACATCGCCGTG |
| | GAGTGGGAGAGCAATGGGCAGCCGGAGAACAACTACAAGACCACGCCTCCCGTGCTG |
| | GACTCCGACGGCTCCTTCTTCCTCTACAGCAAGCTCACCGTGGACAAGAGCAGGTGG |
| | CAGCAGGGGAACGTCTTCTCATGCTCCGTGATGCACGAGGCTCTGCACAACCACTAC |
| | ACGCAGAAGAGCCTCTCCCTGTCTCCGGGTAAAATCGATCCAAATAAAGGAAGTGGA |
| | ACCACTTCAGGTACTACCCGTCTTCTATCTGGGCACACGTGTTTCACGTTGACAGGT |
| | TTGCTTGGGACGCTAGTAACCATGGGCTTGCTGACTTAG |
| | (SEQ ID NO: 289) |
| | >Artificial Sequence; mPDL1-Fc-GPI, Amino Acid |
| | MRIFAGIIFTACCHLLRAFTITAPKDLYVVEYGSNVTMECREPVERELDLLALVVYW |
| | EKEDEQVIQFVAGEEDLKPQHSNERGRASLPKDQLLKGNAALQITDVKLQDAGVYCC |
| | IISYGGADYKRITLKVNAPYRKINQRISVDPATSEHELICQAEGYPEAEVIWTNSDH |
| | QPVSGKRSVTTSRTEGMLLNVTSSLRVNATANDVETCTEWRSQPGQNHTAELIIPEL |
| | PATHPPQNRTIDDKTHTCPPCPAPELLGGPSVFLFPPKPKDTLMISRTPEVTCVVVD |
| | VSHEDPEVKFNWYVDGVEVHNAKTKPREEQYNSTYRVVSVLTVLHQDWLNGKEYKCK |
| | VSNKALPAPIEKTISKAKGQPREPQVYTLPPSREEMTKNQVSLTCLVKGFYPSDIAV |
| | EWESNGQPENNYKTTPPVLDSDGSFFLYSKLTVDKSRWQQGNVFSCSVMHEALHNHY |
| | TQKSLSLSPGKIDPNKGSGTTSGTTRLLSGHTCFTLTGLLGTLVTMGLLT |
| | (SEQ ID NO: 290) |
| mPDL1-GPI | >Artificial Sequence; mPDL1-GPI, DNA |
| | ATGAGGATATTTGCTGGCATTATATTCACAGCCTGCTGTCACTTGCTACGGGCGTTT |
| | ACTATCACGGCTCCAAAGGACTTGTACGTGGTGGAGTATGGCAGCAACGTCACGATG |
| | GAGTGCAGATTCCCTGTAGAACGGGAGCTGGACCTGCTTGCGTTAGTGGTGTACTGG |
| | GAAAAGGAAGATGAGCAAGTGATTCAGTTTGTGGCAGGAGAGGAGGACCTTAAGCCT |
| | CAGCACAGCAACTTCAGGGGGAGAGCCTCGCTGCCAAAGGACCAGCTTTTGAAGGGA |
| | AATGCTGCCCTTCAGATCACAGACGTCAAGCTGCAGGACGCAGGCGTTTACTGCTGC |
| | ATAATCAGCTACGGTGGTGCGGACTACAAGCGAATCACGCTGAAAGTCAATGCCCCA |
| | TACCGCAAAATCAACCAGAGAATTTCCGTGGATCCAGCCACTTCTGAGCATGAACTA |
| | ATATGTCAGGCCGAGGGTTATCCAGAAGCTGAGGTAATCTGGACAAACAGTGACCAC |
| | CAACCCGTGAGTGGGAAGAGAAGTGTCACCACTTCCCGGACAGAGGGGATGCTTCTC |
| | AATGTGACCAGCAGTCTGAGGGTCAACGCCACAGCGAATGATGTTTTCTACTGTACG |
| | TTTTGGAGATCACAGCCAGGGCAAAACCACACAGCGGAGCTGATCATCCCAGAACTG |
| | CCTGCAACACATCCTCCACAGAACAGGACTCCAAATAAAGGAAGTGGAACCACTTCA |
| | GGTACTACCCGTCTTCTATCTGGGCACACGTGTTTCACGTTGACAGGTTTGCTTGGG |
| | ACGCTAGTAACCATGGGCTTGCTGACTTAG |
| | (SEQ ID NO: 291) |
| | >Artificial Sequence; mPDL1-GPI, Amino Acid |
| | MRIFAGIIFTACCHLLRAFTITAPKDLYVVEYGSNVTMECRFPVERELDLLALVVYW |
| | EKEDEQVIQFVAGEEDLKPQHSNFRGRASLPKDQLLKGNAALQITDVKLQDAGVYCC |
| | IISYGGADYKRITLKVNAPYRKINQRISVDPATSEHELICQAEGYPEAEVIWTNSDH |
| | QPVSGKRSVTTSRTEGMLLNVTSSLRVNATANDVFYCTFWRSQPGQNHTAELIIPEL |
| | PATHPPQNRTPNKGSGTTSGTTRLLSGHTCFTLTGLLGTLVTMGLLT |
| | (SEQ ID NO: 292) |
| mPDL2-C1C2 | >Artificial Sequence; mPDL2-C1C2, DNA |
| | ATGCTGCTCCTGCTGCCGATACTGAACCTGAGCTTACAACTTCATCCTGTAGCAGCT |
| | TTATTCACCGTGACAGCCCCTAAAGAAGTGTACACCGTAGACGTCGGCAGCAGTGTG |
| | AGCCTGGAGTGCGATTTTGACCGCAGAGAATGCACTGAACTGGAAGGGATAAGAGCC |
| | AGTTTGCAGAAGGTAGAAAATGATACGTCTCTGCAAAGTGAAAGAGCCACCCTGCTG |
| | GAGGAGCAGCTGCCCCTGGGAAAGGCTTTGTTCCACATCCCTAGTGTCCAAGTGAGA |
| | GATTCCGGGCAGTACCGTTGCCTGGTCATCTGCGGGGCCGCCTGGGACTACAAGTAC |
| | CTGACGGTGAAAGTCAAAGCTTCTTACATGAGGATAGACACTAGGATCCTGGAGGTT |
| | CCAGGTACAGGGGAGGTGCAGCTTACCTGCCAGGCTAGAGGTTATCCCCTAGCAGAA |
| | GTGTCCTGGCAAAATGTCAGTGTTCCTGCCAACACCAGCCACATCAGGACCCCCGAA |
| | GGCCTCTACCAGGTCACCAGTGTTCTGCGCCTCAAGCCTCAGCCTAGCAGAAACTTC |
| | AGCTGCATGTTCTGGAATGCTCACATGAAGGAGCTGACTTCAGCCATCATTGACCCT |
| | CTGAGTCGGATGGAACCCAAAGTCCCCAGAACGATCGATGTCGAGCCACTGGGCATG |
| | GAGAATGGGAACATTGCCAACTCACAGATCGCCGCCTCATCTGTGCGTGTGACCTTC |
| | TTGGGTTTGCAGCATTGGGTCCCGGAGCTGGCCCGCCTGAACCGCGCAGGCATGGTC |
| | AATGCCTGGACACCCAGCAGCAATGACGATAACCCCTGGATCCAGGTGAACCTGCTG |
| | CGGAGGATGTGGGTAACAGGTGTGGTGACGCAGGGTGCCAGCCGCTTGGCCAGTCAT |
| | GAGTACCTGAAGGCCTTCAAGGTGGCCTACAGCCTTAATGGACACGAATTCGATTTC |
| | ATCCATGATGTTAATAAAAAACACAAGGAGTTTGTGGGTAACTGGAACAAAAACGCG |
| | GTGCATGTCAACCTGTTTGAGACCCCTGTGGAGGCTCAGTACGTGAGATTGTACCCC |
| | ACGAGCTGCCACACGGCCTGCACTCTGCGCTTTGAGCTACTGGGCTGTGAGCTGAAC |
| | GGATGCGCCAATCCCCTGGGCCTGAAGAATAACAGCATCCCTGACAAGCAGATCACG |
| | GCCTCCAGCAGCTACAAGACCTGGGGCTTGCATCTCTTCAGCTGGAACCCCTCCTAT |
| | GCACGGCTGGACAAGCAGGGCAACTTCAACGCCTGGGTTGCGGGGAGCTACGGTAAC |
| | GATCAGTGGCTGCAGATCTTCCCTGGCAACTGGGACAACCACTCCCACAAGAAGAAC |
| | TTGTTTGAGACGCCCATCCTGGCTCGCTATGTGCGCATCCTGCCTGTAGCCTGGCAC |
| | AACCGCATCGCCCTGCGCCTGGAGCTGCTGGGCTGTTAG |
| | (SEQ ID NO: 293) |
| | >Artificial Sequence; mPDL2-C1C2, Amino Acid |
| | MLLLLPILNLSLQLHPVAALFIVTAPKEVYTVDVGSSVSLECDFDRRECTELEGIRA |
| | SLQKVENDTSLQSERATLLEEQLPLGKALFHIPSVQVRDSGQYRCLVICGAAWDYKY |
| | LTVEVKASYMRIDTRILEVPGTGEVQLTCQARGYPLAEVSWQNVSVPANTSHIRTPE |
| | GLYQVTSVLRLKPQPSRNFSCMFWNAHMKELTSAIIDPLSRMEPKVPRTIDVEPLGM |
| | ENGNIANSQIAASSVRVTFLGLQHWVPELARLNRAGMVNAWTPSSNDDNPWIQVNLL |
| | RRMWVTGVVTQGASRLASHEYLKAFKVAYSLNGHEFDFIHDVNKKHKEFVGNWNKNA |
| | VHVNLFETPVEAQYVRLYPTSCHTACTLRFELLGCELNGCANPLGLENNSIPDKQIT |
| | ASSSYKTWGLHLFSWNPSYARLDKQGNFNAWVAGSYGNDQWLQIFPGNWDNHSHKKN |
| | LFETPILARYVRILPVAWHNRIALRLELLGC |
| | (SEQ ID NO: 294) |
| mPDL2-Fc-GPI | >Artificial Sequence; mPDL2-Fc-GPI, DNA |
| | ATGCTGCTCCTGCTGCCGATACTGAACCTGAGCTTACAACTTCATCCTGTAGCAGCT |
| | TTATTCACCGTGACAGCCCCTAAAGAAGTGTACACCGTAGACGTCGGCAGCAGTGTG |
| | AGCCTGGAGTGCGATTTTGACCGCAGAGAATGCACTGAACTGGAAGGGATAAGAGCC |
| | AGTTTGCAGAAGGTAGAAAATGATACGTCTCTGCAAAGTGAAAGAGCCACCCTGCTG |
| | GAGGAGCAGCTGCCCCTGGGAAAGGCTTTGTTCCACATCCCTAGTGTCCAAGTGAGA |
| | GATTCCGGGCAGTACCGTTGCCTGGTCATCTGCGGGGCCGCCTGGGACTACAAGTAC |
| | CTGACGGTGAAAGTCAAAGCTTCTTACATGAGGATAGACACTAGGATCCTGGAGGTT |
| | CCAGGTACAGGGGAGGTGCAGCTTACCTGCCAGGCTAGAGGTTATCCCCTAGCAGAA |
| | GTGTCCTGGCAAAATGTCAGTGTTCCTGCCAACACCAGCCACATCAGGACCCCCGAA |
| | GGCCTCTACCAGGTCACCAGTGTTCTGCGCCTCAAGCCTCAGCCTAGCAGAAACTTC |
| | AGCTGCATGTTCTGGAATGCTCACATGAAGGAGCTGACTTCAGCCATCATTGACCCT |
| | CTGAGTCGGATGGAACCCAAAGTCCCCAGAACGATCGATGACAAAACTCACACATGC |
| | CCACCGTGCCCAGCACCTGAACTCCTGGGGGGACCGTCAGTCTTCCTCTTCCCCCCA |
| | AAACCCAAGGACACCCTCATGATCTCCCGGACCCCTGAGGTCACATGCGTGGTGGTG |
| | GACGTGAGCCACGAAGACCCTGAGGTCAAGTTCAACTGGTACGTGGACGGCGTGGAG |
| | GTGCATAATGCCAAGACAAAGCCGCGGGAGGAGCAGTACAACAGCACGTACCGTGTG |
| | GTCAGCGTCCTCACCGTCCTGCACCAGGACTGGCTGAATGGCAAGGAGTACAAGTGC |
| | AAGGTCTCCAACAAAGCCCTCCCAGCCCCCATCGAGAAAACCATCTCCAAAGCCAAA |
| | GGGCAGCCCCGAGAACCACAGGTGTACACCCTGCCCCCATCCCGGGAGGAGATGACC |
| | AAGAACCAGGTCAGCCTGACCTGCCTGGTCAAAGGCTTCTATCCCAGCGACATCGCC |
| | GTGGAGTGGGAGAGCAATGGGCAGCCGGAGAACAACTACAAGACCACGCCTCCCGTG |
| | CTGGACTCCGACGGCTCCTTCTTCCTCTACAGCAAGCTCACCGTGGACAAGAGCAGG |
| | TGGCAGCAGGGGAACGTCTTCTCATGCTCCGTGATGCACGAGGCTCTGCACAACCAC |
| | TACACGCAGAAGAGCCTCTCCCTGTCTCCGGGTAAAATCGATCCAAATAAAGGAAGT |
| | GGAACCACTTCAGGTACTACCCGTCTTCTATCTGGGCACACGTGTTTCACGTTGACA |
| | GGTTTGCTTGGGACGCTAGTAACCATGGGCTTGCTGACTTAG |
| | (SEQ ID NO: 295) |
| | >Artificial Sequence; mPDL2-Fc-GPI, Amino Acid |
| | MLLLLPILNLSLQLHPVAALFTVTAPKEVYTVDVGSSVSLECDFDRRECTELEGIRA |
| | SLQKVENDTSLQSERATLLEEQLPLGKALFHIPSVQVRDSGQYRCLVICGAAWDYKY |
| | LTVKVKASYMRIDTRILEVPGTGEVQLTCQARGYPLAEVSWQNVSVPANTSHIRTPE |
| | GLYQVTSVLRLKPQPSRNFSCMFWNAHMKELTSAIIDPLSRMEPKVPRTIDDKTHTC |
| | PPCPAPELLGGPSVFLFPPKPKDTLMISRTPEVTCVVVDVSHEDPEVKFNWYVDGVE |
| | VHNAKTKPREEQYNSTYRVVSVLTVLHQDWLNGKEYKCKVSNKALPAPIEKTISKAK |
| | GQPREPQVYTLPPSREEMTKNQVSLTCLVKGFYPSDIAVEWESNGQPENNYKTTPPV |
| | LDSDGSFFLYSKLIVDKSRWQQGNVESCSVMHEALHNHYTQKSLSLSPGKIDPNKGS |
| | GTTSGTTRLLSGHTCFTLTGLLGTLVTMGLLT |
| | (SEQ ID NO: 296) |
| mPDL1-mFc-GPI | >Artificial Sequence; mPDL1-mFc-GPI, DNA |
| | ATGAGGATATTTGCTGGCATTATATTCACAGCCTGCTGTCACTTGCTACGGGCGTTT |
| | ACTATCACGGCTCCAAAGGACTTGTACGTGGTGGAGTATGGCAGCAACGTCACGATG |
| | GAGTGCAGATTCCCTGTAGAACGGGAGCTGGACCTGCTTGCGTTAGTGGTGTACTGG |
| | GAAAAGGAAGATGAGCAAGTGATTCAGTTTGTGGCAGGAGAGGAGGACCTTAAGCCT |
| | CAGCACAGCAACTTCAGGGGGAGAGCCTCGCTGCCAAAGGACCAGCTTTTGAAGGGA |
| | AATGCTGCCCTTCAGATCACAGACGTCAAGCTGCAGGACGCAGGCGTTTACTGCTGC |
| | ATAATCAGCTACGGTGGTGCGGACTACAAGCGAATCACGCTGAAAGTCAATGCCCCA |
| | TACCGCAAAATCAACCAGAGAATTTCCGTGGATCCAGCCACTTCTGAGCATGAACTA |
| | ATATGTCAGGCCGAGGGTTATCCAGAAGCTGAGGTAATCTGGACAAACAGTGACCAC |
| | CAACCCGTGAGTGGGAAGAGAAGTGTCACCACTTCCCGGACAGAGGGGATGCTTCTC |
| | AATGTGACCAGCAGTCTGAGGGTCAACGCCACAGCGAATGATGTTTTCTACTGTACG |
| | TTTTGGAGATCACAGCCAGGGCAAAACCACACAGCGGAGCTGATCATCCCAGAACTG |
| | CCTGCAACACATCCTCCACAGAACAGGACTGGTTGTAAGCCTTGCATATGTACAGTC |
| | CCAGAAGTATCATCTGTCTTCATCTTCCCCCCAAAGCCCAAGGATGTGCTCACCATT |
| | ACTCTGACTCCTAAGGTCACGTGTGTTGTGGTAGACATCAGCAAGGATGATCCCGAG |
| | GTCCAGTTCAGCTGGTTTGTAGATGATGTGGAGGTGCACACAGCTCAGACGCAACCC |
| | CGGGAGGAGCAGTTCAACAGCACTTTCCGCTCAGTCAGTGAACTTCCCATCATGCAC |
| | CAGGACTGGCTCAATGGCAAGGAGTTCAAATGCAGGGTCAACAGTGCAGCTTTCCCT |
| | GCCCCCATCGAGAAAACCATCTCCAAAACCAAAGGCAGACCGAAGGCTCCACAGGTG |
| | TACACCATTCCACCTCCCAAGGAGCAGATGGCCAAGGATAAAGTCAGTCTGACCTGC |
| | ATGATAACAGACTTCTTCCCTGAAGACATTACTGTGGAGTGGCAGTGGAATGGGCAG |
| | CCAGCGGAGAACTACAAGAACACTCAGCCCATCATGGACACAGATGGCTCTTACTTC |
| | GTCTACAGCAAGCTCAATGTGCAGAAGAGCAACTGGGAGGCAGGAAATACTTTCACC |
| | TGCTCTGTGTTACATGAGGGCCTGCACAACCACCATACTGAGAAGAGCCTCTCCCAC |
| | TCTCCTGGTAAACCAAATAAAGGAAGTGGAACCACTTCAGGTACTACCCGTCTTCTA |
| | TCTGGGCACACGTGTTTCACGTTGACAGGTTTGCTTGGGACGCTAGTAACCATGGGC |
| | TTGCTGACTTAG |
| | (SEQ ID NO: 297) |
| | >Artificial Sequence; mPDL1-mFc-GPI, Amino Acid |
| | MRIFAGIIFTACCHLLRAFTITAPKDLYVVEYGSNVTMECREPVERELDLLALVVYW |
| | EKEDEQVIQFVAGEEDLKPQHSNERGRASLPKDQLLKGNAALQITDVKLQDAGVYCC |
| | IISYGGADYKRITLKVNAPYRKINQRISVDPATSEHELICQAEGYPEAEVIWTNSDH |
| | QPVSGKRSVTTSRTEGMLLNVTSSLRVNATANDVETCTEWRSQPGQNHTAELIIPEL |
| | PATHPPQNRTGCKPCICTVPEVSSVFIFPPKPKDVLTITLTPKVTCVVVDISKDDPE |
| | VQFSWFVDDVEVHTAQTQPREEQFNSTFRSVSELPIMHQDWLNGKEFKCRVNSAAFP |
| | APIEKTISKTKGRPKAPQVYTIPPPKEQMAKDKVSLTCMITDFFPEDITVEWQWNGQ |
| | PAENYKNTQPIMDTDGSYFVYSKLNVQKSNWEAGNTFTCSVLHEGLHNHHTEKSLSH |
| | SPGKPNKGSGTTSGTTRLLSGHTCFTLTGLLGTLVTMGLLT |
| | (SEQ ID NO: 298) |
| mPDL2-GPI | >Artificial Sequence; mPDL2-GPI, DNA |
| | ATGCTGCTCCTGCTGCCGATACTGAACCTGAGCTTACAACTTCATCCTGTAGCAGCT |
| | TTATTCACCGTGACAGCCCCTAAAGAAGTGTACACCGTAGACGTCGGCAGCAGTGTG |
| | AGCCTGGAGTGCGATTTTGACCGCAGAGAATGCACTGAACTGGAAGGGATAAGAGCC |
| | AGTTTGCAGAAGGTAGAAAATGATACGTCTCTGCAAAGTGAAAGAGCCACCCTGCTG |
| | GAGGAGCAGCTGCCCCTGGGAAAGGCTTTGTTCCACATCCCTAGTGTCCAAGTGAGA |
| | GATTCCGGGCAGTACCGTTGCCTGGTCATCTGCGGGGCCGCCTGGGACTACAAGTAC |
| | CTGACGGTGAAAGTCAAAGCTTCTTACATGAGGATAGACACTAGGATCCTGGAGGTT |
| | CCAGGTACAGGGGAGGTGCAGCTTACCTGCCAGGCTAGAGGTTATCCCCTAGCAGAA |
| | GTGTCCTGGCAAAATGTCAGTGTTCCTGCCAACACCAGCCACATCAGGACCCCCGAA |
| | GGCCTCTACCAGGTCACCAGTGTTCTGCGCCTCAAGCCTCAGCCTAGCAGAAACTTC |
| | AGCTGCATGTTCTGGAATGCTCACATGAAGGAGCTGACTTCAGCCATCATTGACCCT |
| | CTGAGTCGGATGGAACCCAAAGTCCCCAGAACGCCAAATAAAGGAAGTGGAACCACT |
| | TCAGGTACTACCCGTCTTCTATCTGGGCACACGTGTTTCACGTTGACAGGTTTGCTT |
| | GGGACGCTAGTAACCATGGGCTTGCTGACTTAG |
| | (SEQ ID NO: 299) |
| | >Artificial Sequence; mPDL2-GPI, Amino Acid |
| | MLLLLPILNLSLQLHPVAALFIVTAPKEVYTVDVGSSVSLECDFDRRECTELEGIRA |
| | SLQKVENDTSLQSERATLLEEQLPLGKALFHIPSVQVRDSGQYRCLVICGAAWDYKY |
| | LTVEVKASYMRIDTRILEVPGTGEVQLTCQARGYPLAEVSWQNVSVPANTSHIRTPE |
| | GLYQVTSVLRLKPQPSRNFSCMFWNAHMKELTSAIIDPLSRMEPKVPRTPNKGSGTT |
| | SGTTRLLSGHTCFTLTGLLGTLVTMGLLT |
| | (SEQ ID NO: 300) |
| mPDL1-GPI-P2A- | >Artificial Sequence; mPDL1-GPI-P2A-mHVEM-GPI, DNA |
| mHVEM-GPI | ATGAGGATATTTGCTGGCATTATATTCACAGCCTGCTGTCACTTGCTACGGGCGTTT |
| | ACTATCACGGCTCCAAAGGACTTGTACGTGGTGGAGTATGGCAGCAACGTCACGATG |
| | GAGTGCAGATTCCCTGTAGAACGGGAGCTGGACCTGCTTGCGTTAGTGGTGTACTGG |
| | GAAAAGGAAGATGAGCAAGTGATTCAGTTTGTGGCAGGAGAGGAGGACCTTAAGCCT |
| | CAGCACAGCAACTTCAGGGGGAGAGCCTCGCTGCCAAAGGACCAGCTTTTGAAGGGA |
| | AATGCTGCCCTTCAGATCACAGACGTCAAGCTGCAGGACGCAGGCGTTTACTGCTGC |
| | ATAATCAGCTACGGTGGTGCGGACTACAAGCGAATCACGCTGAAAGTCAATGCCCCA |
| | TACCGCAAAATCAACCAGAGAATTTCCGTGGATCCAGCCACTTCTGAGCATGAACTA |
| | ATATGTCAGGCCGAGGGTTATCCAGAAGCTGAGGTAATCTGGACAAACAGTGACCAC |
| | CAACCCGTGAGTGGGAAGAGAAGTGTCACCACTTCCCGGACAGAGGGGATGCTTCTC |
| | AATGTGACCAGCAGTCTGAGGGTCAACGCCACAGCGAATGATGTTTTCTACTGTACG |
| | TTTTGGAGATCACAGCCAGGGCAAAACCACACAGCGGAGCTGATCATCCCAGAACTG |
| | CCTGCAACACATCCTCCACAGAACAGGACTCCAAATAAAGGAAGTGGAACCACTTCA |
| | GGTACTACCCGTCTTCTATCTGGGCACACGTGTTTCACGTTGACAGGTTTGCTTGGG |
| | ACGCTAGTAACCATGGGCTTGCTGACTGGAAGCGGAGCTACTAACTTCAGCCTGCTG |
| | AAGCAGGCTGGCGACGTGGAGGAGAACCCTGGACCTATGGAACCTCTCCCAGGATGG |
| | GGGTCGGCACCCTGGAGCCAGGCCCCTACAGACAACACCTTCAGGCTGGTGCCTTGT |
| | GTCTTCCTTTTGAACTTGCTGCAGCGCATCTCTGCCCAGCCCTCATGCAGACAGGAG |
| | GAGTTCCTTGTGGGAGACGAGTGCTGCCCCATGTGCAACCCAGGTTACCATGTGAAG |
| | CAGGTCTGCAGTGAGCATACAGGCACAGTGTGTGCCCCCTGTCCCCCACAGACATAT |
| | ACCGCCCATGCAAATGGCCTGAGCAAGTGTCTGCCCTGCGGAGTCTGTGATCCAGAC |
| | ATGGGCCTGCTGACCTGGCAGGAGTGCTCCAGCTGGAAGGACACTGTGTGCAGATGC |
| | ATCCCAGGCTACTTCTGTGAGAACCAGGATGGGAGCCACTGTTCCACATGCTTGCAG |
| | CACACCACCTGCCCTCCAGGGCAGAGGGTAGAGAAGAGAGGGACTCACGACCAGGAC |
| | ACTGTATGTGCTGACTGCCTAACAGGGACCTTCTCACTTGGAGGGACTCAGGAGGAA |
| | TGCCTGCCCTGGACCAACTGCAGTGCATTTCAACAGGAAGTAAGACGTGGGACCAAC |
| | AGCACAGACACCACCTGCTCCTCCCAGCCAAATAAAGGAAGTGGAACCACTTCAGGT |
| | ACTACCCGTCTTCTATCTGGGCACACGTGTTTCACGTTGACAGGTTTGCTTGGGACG |
| | CTAGTAACCATGGGCTTGCTGACTTAG |
| | (SEQ ID NO: 301) |
| | >Artificial Sequence; mPDL1-GPI-P2A-mHVEM-GPI, Amino Acid |
| | MRIFAGIIFTACCHLLRAFTITAPKDLYVVEYGSNVTMECREPVERELDLLALVVYW |
| | EKEDEQVIQFVAGEEDLKPQHSNERGRASLPKDQLLKGNAALQITDVKLQDAGVYCC |
| | IISYGGADYKRITLKVNAPYRKINQRISVDPATSEHELICQAEGYPEAEVIWTNSDH |
| | QPVSGKRSVTTSRTEGMLLNVTSSLRVNATANDWYCTEWRSQPGQNHTAELIIPEL |
| | PATHPPQNRTPNKGSGTTSGTTRLLSGHTCFTLTGLLGTLVTMGLLTGSGATNFSLL |
| | KQAGDVEENPGPMEPLPGWGSAPWSQAPTDNTFRLVPCVFLLNLLQRISAQPSCRQE |
| | EFLVGDECCPMCNPGYHVKQVCSEHTGTVCAPCPPQTYTAHANGLSKCLPCGVCDPD |
| | MGLLTWQECSSWKDTVCRCIPGYFCENQDGSHCSTCLQHTTCPPGQRVEKRGTHDQD |
| | TVCADCLTGTFSLGGTQEECLPWTNCSAFQQEVRRGTNSTDTTCSSQPNKGSGTTSG |
| | TTRLLSGHTCFTLTGLLGTLVTMGLLT |
| | (SEQ ID NO: 302) |
| hPDL1-ADAM10 | >Artificial Sequence; hPDL1-ADAM10, DNA |
| | ATGAGGATATTTGCTGTCTTTATATTCATGACCTACTGGCATTTGCTGAACGCATTT |
| | ACTGTCACGGTTCCCAAGGACCTATATGTGGTAGAGTATGGTAGCAATATGACAATT |
| | GAATGCAAATTCCCAGTAGAAAAACAATTAGACCTGGCTGCACTAATTGTCTATTGG |
| | GAAATGGAGGATAAGAACATTATTCAATTTGTGCATGGAGAGGAAGACCTGAAGGTT |
| | CAGCATAGTAGCTACAGACAGAGGGCCCGGCTGTTGAAGGACCAGCTCTCCCTGGGA |
| | AATGCTGCACTTCAGATCACAGATGTGAAATTGCAGGATGCAGGGGTGTACCGCTGC |
| | ATGATCAGCTATGGTGGTGCCGACTACAAGCGAATTACTGTGAAAGTCAATGCCCCA |
| | TACAACAAAATCAACCAAAGAATTTTGGTTGTGGATCCAGTCACCTCTGAACATGAA |
| | CTGACATGTCAGGCTGAGGGCTACCCCAAGGCCGAAGTCATCTGGACAAGCAGTGAC |
| | CATCAAGTCCTGAGTGGTAAGACCACCACCACCAATTCCAAGAGAGAGGAGAAGCTT |
| | TTCAATGTGACCAGCACACTGAGAATCAACACAACAACTAATGAGATTTTCTACTGC |
| | ACTTTTAGGAGATTAGATCCTGAGGAAAACCATACAGCTGAATTGGTCATCCCAGAA |
| | CTACCTCTGGCACATCCTCCAAATGAAAGGTGTGGAAATGGAATGGTAGAACAAGGT |
| | GAAGAATGTGATTGTGGCTATAGTGACCAGTGTAAAGATGAATGCTGCTTCGATGCA |
| | AATCAACCAGAGGGAAGAAAATGCAAACTGAAACCTGGGAAACAGTGCAGTCCAAGT |
| | CAAGGTCCTTGTTGTACAGCACAGTGTGCATTCAAGTCAAAGTCTGAGAAGTGTCGG |
| | GATGATTCAGACTGTGCAAGGGAAGGAATATGTAATGGCTTCACAGCTCTCTGCCCA |
| | GCATCTGACCCTAAACCAAACTTCACAGACTGTAATAGGCATACACAAGTGTGCATT |
| | AATGGGCAATGTGCAGGTTCTATCTGTGAGAAATATGGCTTAGAGGAGTGTACGTGT |
| | GCCAGTTCTGATGGCAAAGATGATAAAGAATTATGCCATGTATGCTGTATGAAGAAA |
| | ATGGACCCATCAACTTGTGCCAGTACAGGGTCTGTGCAGTGGAGTAGGCACTTCAGT |
| | GGTCGAACCATCACCCTGCAACCTGGATCCCCTTGCAACGATTTTAGAGGTTACTGT |
| | GATGTTTTCATGCGGTGCAGATTAGTAGATGCTGATGGTCCTCTAGCTAGGCTTAAA |
| | AAAGCAATTTTTAGTCCAGAGCTCTATGAAAACATTGCTGAATGGATTGTGGCTCAT |
| | TGGTGGGCAGTATTACTTATGGGAATTGCTCTGATCATGCTAATGGCTGGATTTATT |
| | AAGATATGCAGTGTTCATACTCCAAGTAGTAATCCAAAGTTGCCTCCTCCTAAACCA |
| | CTTCCAGGCACTTTAAAGAGGAGGAGACCTCCACAGCCCATTCAGCAACCCCAGCGT |
| | CAGCGGCCCCGAGAGAGTTATCAAATGGGACACATGAGACGCTAA |
| | (SEQ ID NO: 303) |
| | >Artificial Sequence; hPDL1-ADAM10, Amino Acid |
| | MRIFAVFIFMTYWHLLNAFTVTVPKDLYVVEYGSNMTIECKFPVEKQLDLAALIVYW |
| | EMEDKNIIQFVHGEEDLKVQHSSYRQRARLLKDQLSLGNAALQITDVKLQDAGVYRC |
| | MISYGGADYKRITVKVNAPYNKINQRILVVDPVTSEHELTCQAEGYPKAEVIWTSSD |
| | HQVLSGKTTTTNSKREEKLFNVTSTLRINTTTNEIFYCTFRRLDPEENHTAELVIPE |
| | LPLAHPPNERCGNGMVEQGEECDCGYSDQCKDECCFDANQPEGRKCKLKPGKQCSPS |
| | QGPCCTAQCAFKSKSEKCRDDSDCAREGICNGFTALCPASDPKPNFTDCNRHTQVCI |
| | NGQCAGSICEKYGLEECTCASSDGKDDEELCHVCCMKKMDPSTCASTGSVQWSRETS |
| | GRTITLQPGSPCNDFRGYCDVFMRCRLVDADGPLARLKKAIFSPELYENIAEWIVAH |
| | WWAVILMGIALIMLMAGFIKICSVHTPSSNPKLPPPKPLPGTLERRRPPQPIQQPQR |
| | QRPRESYQMGHMRR |
| | (SEQ ID NO: 304) |
| hPDL1-4Fc- | >Artificial Sequence; hPDL1-4Fc-CD9tm2, DNA |
| CD9tm2 | ATGAGGATATTTGCTGTCTTTATATTCATGACCTACTGGCATTTGCTGAACGCATTT |
| | ACTGTCACGGTTCCCAAGGACCTATATGTGGTAGAGTATGGTAGCAATATGACAATT |
| | GAATGCAAATTCCCAGTAGAAAAACAATTAGACCTGGCTGCACTAATTGTCTATTGG |
| | GAAATGGAGGATAAGAACATTATTCAATTTGTGCATGGAGAGGAAGACCTGAAGGTT |
| | CAGCATAGTAGCTACAGACAGAGGGCCCGGCTGTTGAAGGACCAGCTCTCCCTGGGA |
| | AATGCTGCACTTCAGATCACAGATGTGAAATTGCAGGATGCAGGGGTGTACCGCTGC |
| | ATGATCAGCTATGGTGGTGCCGACTACAAGCGAATTACTGTGAAAGTCAATGCCCCA |
| | TACAACAAAATCAACCAAAGAATTTTGGTTGTGGATCCAGTCACCTCTGAACATGAA |
| | CTGACATGTCAGGCTGAGGGCTACCCCAAGGCCGAAGTCATCTGGACAAGCAGTGAC |
| | CATCAAGTCCTGAGTGGTAAGACCACCACCACCAATTCCAAGAGAGAGGAGAAGCTT |
| | TTCAATGTGACCAGCACACTGAGAATCAACACAACAACTAATGAGATTTTCTACTGC |
| | ACTTTTAGGAGATTAGATCCTGAGGAAAACCATACAGCTGAATTGGTCATCCCAGAA |
| | CTACCTCTGGCACATCCTCCAAATGAAAGGGAGTCCAAATATGGTCCCCCATGCCCA |
| | TCATGCCCAGCACCTGAGTTCCTGGGGGGACCATCAGTCTTCCTGTTCCCCCCAAAA |
| | CCCAAGGACACTCTCATGATCTCCCGGACCCCTGAGGTCACGTGCGTGGTGGTGGAC |
| | GTGAGCCAGGAAGACCCCGAGGTCCAGTTCAACTGGTACGTGGATGGCGTGGAGGTG |
| | CATAATGCCAAGACAAAGCCGCGGGAGGAGCAGTTCAACAGCACGTACCGTGTGGTC |
| | AGGGTCCTCACCGTCCTGCACCAGGACTGGCTGAACGGTAAGGAGTACAAGTGCAAG |
| | GTCTCCAACAAAGGCCTCCCGTCCTCCATCGAGAAAACCATCTCCAAAGCCAAAGGG |
| | CAGCCCCGAGAGCCACAGGTGTACACCCTGCCCCCATCCCAGGAGGAGATGACCAAG |
| | AACCAGGTCAGCCTGACCTGCCTGGTCAAAGGCTTCTACCCCAGCGACATCGCCGTG |
| | GAGTGGGAGAGCAATGGGCAGCCGGAGGACAACTACAAGACCACGCCTCCCGTGCTG |
| | GACTCCGACGGCTCCTTCTTCCTCTACAGCAGGCTAACCGTGGACAAGAGCAGGTGG |
| | CAGGAGGGGAATGTCTTCTCATGCTCCGTGATGCATGAGGCTCTGCACAACCACTAC |
| | ACACAGAAGAGCCTCTCCCTGTCTCCGGGTAAATTCTACACAGGAGTCTATATTCTG |
| | ATCGGAGCCGGCGCCCTCATGATGCTGGTGGGCTTCCTGGGCTGCTGCGGGGCTGTG |
| | CAGGAGTCCCAGTGC |
| | (SEQ ID NO: 305) |
| | >Artificial Sequence; hPDL1-4Fc-CD9tm2, Amino Acid |
| | MRIFAVFIFMTYWHLLNAFTVTVPKDLYVVEYGSNMTIECKFPVEKQLDLAALIVYW |
| | EMEDKNITQFVHGEEDLKVQHSSYRQRARLLKDQLSLGNAALQITDVKLQDAGVYRC |
| | MISYGGADYKRITVKVNAPYNKINQRILVVDPVTSEHELTCQAEGYPKAEVIWTSSD |
| | HQVLSGKTTTTNSKREEKLFNVTSTLRINTTTNEIFYCTFRRLDPEENHTAELVIPE |
| | LPLAHPPNERESKYGPPCPSCPAPEFLGGPSVFLFPPKPKDTLMISRTPEVTCVVVD |
| | VSQEDPEVQFNWYVDGVEVHNAKTKPREEQFNSTYRVVRVLTVLHQDWLNGKEYKCK |
| | VSNKGLPSSIEKTISKAKGQPREPQVYTLPPSQEEMTKNQVSLTCLVKGFYPSDIAV |
| | EWESNGQPEDNYKTTPPVLDSDGSFFLYSRLTVDKSRWQEGNVFSCSVMHEALHNHY |
| | TQKSLSLSPGKFYTGVYILIGAGALMMLVGFLGCCGAVQESQCVIM |
| | (SEQ ID NO: 306) |
| hPDL1-4Fc- | >Artificial Sequence; hPDL1-4Fc-CD9tm2-KRAS, DNA |
| CD9tm2- | ATGAGGATATTTGCTGTCTTTATATTCATGACCTACTGGCATTTGCTGAACGCATTT |
| modified KRas | ACTGTCACGGTTCCCAAGGACCTATATGTGGTAGAGTATGGTAGCAATATGACAATT |
| | GAATGCAAATTCCCAGTAGAAAAACAATTAGACCTGGCTGCACTAATTGTCTATTGG |
| | GAAATGGAGGATAAGAACATTATTCAATTTGTGCATGGAGAGGAAGACCTGAAGGTT |
| | CAGCATAGTAGCTACAGACAGAGGGCCCGGCTGTTGAAGGACCAGCTCTCCCTGGGA |
| | AATGCTGCACTTCAGATCACAGATGTGAAATTGCAGGATGCAGGGGTGTACCGCTGC |
| | ATGATCAGCTATGGTGGTGCCGACTACAAGCGAATTACTGTGAAAGTCAATGCCCCA |
| | TACAACAAAATCAACCAAAGAATTTTGGTTGTGGATCCAGTCACCTCTGAACATGAA |
| | CTGACATGTCAGGCTGAGGGCTACCCCAAGGCCGAAGTCATCTGGACAAGCAGTGAC |
| | CATCAAGTCCTGAGTGGTAAGACCACCACCACCAATTCCAAGAGAGAGGAGAAGCTT |
| | TTCAATGTGACCAGCACACTGAGAATCAACACAACAACTAATGAGATTTTCTACTGC |
| | ACTTTTAGGAGATTAGATCCTGAGGAAAACCATACAGCTGAATTGGTCATCCCAGAA |
| | CTACCTCTGGCACATCCTCCAAATGAAAGGGAGTCCAAATATGGTCCCCCATGCCCA |
| | TCATGCCCAGCACCTGAGTTCCTGGGGGGACCATCAGTCTTCCTGTTCCCCCCAAAA |
| | CCCAAGGACACTCTCATGATCTCCCGGACCCCTGAGGTCACGTGCGTGGTGGTGGAC |
| | GTGAGCCAGGAAGACCCCGAGGTCCAGTTCAACTGGTACGTGGATGGCGTGGAGGTG |
| | CATAATGCCAAGACAAAGCCGCGGGAGGAGCAGTTCAACAGCACGTACCGTGTGGTC |
| | AGGGTCCTCACCGTCCTGCACCAGGACTGGCTGAACGGTAAGGAGTACAAGTGCAAG |
| | GTCTCCAACAAAGGCCTCCCGTCCTCCATCGAGAAAACCATCTCCAAAGCCAAAGGG |
| | CAGCCCCGAGAGCCACAGGTGTACACCCTGCCCCCATCCCAGGAGGAGATGACCAAG |
| | AACCAGGTCAGCCTGACCTGCCTGGTCAAAGGCTTCTACCCCAGCGACATCGCCGTG |
| | GAGTGGGAGAGCAATGGGCAGCCGGAGGACAACTACAAGACCACGCCTCCCGTGCTG |
| | GACTCCGACGGCTCCTTCTTCCTCTACAGCAGGCTAACCGTGGACAAGAGCAGGTGG |
| | CAGGAGGGGAATGTCTTCTCATGCTCCGTGATGCATGAGGCTCTGCACAACCACTAC |
| | ACACAGAAGAGCCTCTCCCTGTCTCCGGGTAAATTCTACACAGGAGTCTATATTCTG |
| | ATCGGAGCCGGCGCCCTCATGATGCTGGTGGGCTTCCTGGGCTGCTGCGGGGCTGTG |
| | CAGGAGTCCCAGTGCAAAAAGAAGAAAAAGAAGAAGAAGACAAAGTGTGTAATTATG |
| | TAA |
| | (SEQ ID NO: 307) |
| | >Artificial Sequence; hPDL1-4Fc-CD9tm2-KRAS, Amino Acid |
| | MRIFAVFIFMTYWHLLNAFTVTVPKDLYVVEYGSNMTIECKFPVEKQLDLAALIVYW |
| | EMEDKNITQFVHGEEDLKVQHSSYRQRARLLKDQLSLGNAALQITDVKLQDAGVYRC |
| | MISYGGADYKRITVKVNAPYNKINQRILVVDPVTSEHELTCQAEGYPKAEVIWTSSD |
| | HQVLSGKTTTTNSKREEKLFNVTSTLRINTTTNEIFYCTFRRLDPEENHTAELVIPE |
| | LPLAHPPNERESKYGPPCPSCPAPEFLGGPSVFLFPPKPKDTLMISRTPEVTCVVVD |
| | VSQEDPEVQFNWYVDGVEVHNAKTKPREEQFNSTYRVVRVLTVLHQDWLNGKEYKCK |
| | VSNKGLPSSIEKTISKAKGQPREPQVYTLPPSQEEMTKNQVSLTCLVKGFYPSDIAV |
| | EWESNGQPEDNYKTTPPVLDSDGSFFLYSRLTVDKSRWQEGNVFSCSVMHEALHNHY |
| | TQKSLSLSPGKFYTGVYILIGAGALMMLVGFLGCCGAVQESQCKKKKKKKKTKCVIM |
| | (SEQ ID NO: 308) |
| hPDL1-Fc- | >Artificial Sequence; hPDL1-Fc-CD9tm2, DNA |
| CD9tm2 | ATGAGGATATTTGCTGTCTTTATATTCATGACCTACTGGCATTTGCTGAACGCATTT |
| | ACTGTCACGGTTCCCAAGGACCTATATGTGGTAGAGTATGGTAGCAATATGACAATT |
| | GAATGCAAATTCCCAGTAGAAAAACAATTAGACCTGGCTGCACTAATTGTCTATTGG |
| | GAAATGGAGGATAAGAACATTATTCAATTTGTGCATGGAGAGGAAGACCTGAAGGTT |
| | CAGCATAGTAGCTACAGACAGAGGGCCCGGCTGTTGAAGGACCAGCTCTCCCTGGGA |
| | AATGCTGCACTTCAGATCACAGATGTGAAATTGCAGGATGCAGGGGTGTACCGCTGC |
| | ATGATCAGCTATGGTGGTGCCGACTACAAGCGAATTACTGTGAAAGTCAATGCCCCA |
| | TACAACAAAATCAACCAAAGAATTTTGGTTGTGGATCCAGTCACCTCTGAACATGAA |
| | CTGACATGTCAGGCTGAGGGCTACCCCAAGGCCGAAGTCATCTGGACAAGCAGTGAC |
| | CATCAAGTCCTGAGTGGTAAGACCACCACCACCAATTCCAAGAGAGAGGAGAAGCTT |
| | TTCAATGTGACCAGCACACTGAGAATCAACACAACAACTAATGAGATTTTCTACTGC |
| | ACTTTTAGGAGATTAGATCCTGAGGAAAACCATACAGCTGAATTGGTCATCCCAGAA |
| | CTACCTCTGGCACATCCTCCAAATGAAAGGATCGATGACAAAACTCACACATGCCCA |
| | CCGTGCCCAGCACCTGAACTCCTGGGGGGACCGTCAGTCTTCCTCTTCCCCCCAAAA |
| | CCCAAGGACACCCTCATGATCTCCCGGACCCCTGAGGTCACATGCGTGGTGGTGGAC |
| | GTGAGCCACGAAGACCCTGAGGTCAAGTTCAACTGGTACGTGGACGGCGTGGAGGTG |
| | CATAATGCCAAGACAAAGCCGCGGGAGGAGCAGTACAACAGCACGTACCGTGTGGTC |
| | AGCGTCCTCACCGTCCTGCACCAGGACTGGCTGAATGGCAAGGAGTACAAGTGCAAG |
| | GTCTCCAACAAAGCCCTCCCAGCCCCCATCGAGAAAACCATCTCCAAAGCCAAAGGG |
| | CAGCCCCGAGAACCACAGGTGTACACCCTGCCCCCATCCCGGGAGGAGATGACCAAG |
| | AACCAGGTCAGCCTGACCTGCCTGGTCAAAGGCTTCTATCCCAGCGACATCGCCGTG |
| | GAGTGGGAGAGCAATGGGCAGCCGGAGAACAACTACAAGACCACGCCTCCCGTGCTG |
| | GACTCCGACGGCTCCTTCTTCCTCTACAGCAAGCTCACCGTGGACAAGAGCAGGTGG |
| | CAGCAGGGGAACGTCTTCTCATGCTCCGTGATGCACGAGGCTCTGCACAACCACTAC |
| | ACGCAGAAGAGCCTCTCCCTGTCTCCGGGTAAAATCGATTTCTACACAGGAGTCTAT |
| | ATTCTGATCGGAGCCGGCGCCCTCATGATGCTGGTGGGCTTCCTGGGCTGCTGCGGG |
| | GCTGTGCAGGAGTCCCAGTGCGTAATTATGTAA |
| | (SEQ ID NO: 309) |
| | >Artificial Sequence; hPDL1-Fc-CD9tm2, Amino Acid |
| | MRIFAVFIFMTYWHLLNAFTVTVPKDLYVVEYGSNMTIECKFPVEKQLDLAALIVYW |
| | EMEDKNIIQFVHGEEDLKVQHSSYRQRARLLKDQLSLGNAALQITDVKLQDAGVYRC |
| | MISYGGADYKRITVKVNAPYNKINQRILVVDPVTSEHELTCQAEGYPKAEVIWTSSD |
| | HQVLSGKTTTTNSKREEKLFNVTSTLRINTTTNEIFYCTFRRLDPEENHTAELVIPE |
| | LPLAHPPNERIDDKTHTCPPCPAPELLGGPSVFLFPPKPKDTLMISRTPEVTCVVVD |
| | VSHEDPEVKFNWYVDGVEVHNAKTKPREEQYNSTYRVVSVLTVLHQDWLNGKEYKCK |
| | VSNKALPAPIEKTISKAKGQPREPQVYTLPPSREEMTKNQVSLTCLVKGFYPSDIAV |
| | EWESNGQPENNYKTTPPVLDSDGSFFLYSKLTVDKSRWQQGNVFSCSVMHEALHNHY |
| | TQKSLSLSPGKIDFYTGVYILIGAGALMMLVGFLGCCGAVQESQCVIM |
| | (SEQ ID NO: 310) |
| hPDL1-Fc- | >Artificial Sequence; hPDL1-Fc-CD9tm2-KRAS, DNA |
| CD9tm2- | ATGAGGATATTTGCTGTCTTTATATTCATGACCTACTGGCATTTGCTGAACGCATTT |
| modified KRAS | ACTGTCACGGTTCCCAAGGACCTATATGTGGTAGAGTATGGTAGCAATATGACAATT |
| | GAATGCAAATTCCCAGTAGAAAAACAATTAGACCTGGCTGCACTAATTGTCTATTGG |
| | GAAATGGAGGATAAGAACATTATTCAATTTGTGCATGGAGAGGAAGACCTGAAGGTT |
| | CAGCATAGTAGCTACAGACAGAGGGCCCGGCTGTTGAAGGACCAGCTCTCCCTGGGA |
| | AATGCTGCACTTCAGATCACAGATGTGAAATTGCAGGATGCAGGGGTGTACCGCTGC |
| | ATGATCAGCTATGGTGGTGCCGACTACAAGCGAATTACTGTGAAAGTCAATGCCCCA |
| | TACAACAAAATCAACCAAAGAATTTTGGTTGTGGATCCAGTCACCTCTGAACATGAA |
| | CTGACATGTCAGGCTGAGGGCTACCCCAAGGCCGAAGTCATCTGGACAAGCAGTGAC |
| | CATCAAGTCCTGAGTGGTAAGACCACCACCACCAATTCCAAGAGAGAGGAGAAGCTT |
| | TTCAATGTGACCAGCACACTGAGAATCAACACAACAACTAATGAGATTTTCTACTGC |
| | ACTTTTAGGAGATTAGATCCTGAGGAAAACCATACAGCTGAATTGGTCATCCCAGAA |
| | CTACCTCTGGCACATCCTCCAAATGAAAGGATCGATGACAAAACTCACACATGCCCA |
| | CCGTGCCCAGCACCTGAACTCCTGGGGGGACCGTCAGTCTTCCTCTTCCCCCCAAAA |
| | CCCAAGGACACCCTCATGATCTCCCGGACCCCTGAGGTCACATGCGTGGTGGTGGAC |
| | GTGAGCCACGAAGACCCTGAGGTCAAGTTCAACTGGTACGTGGACGGCGTGGAGGTG |
| | CATAATGCCAAGACAAAGCCGCGGGAGGAGCAGTACAACAGCACGTACCGTGTGGTC |
| | AGCGTCCTCACCGTCCTGCACCAGGACTGGCTGAATGGCAAGGAGTACAAGTGCAAG |
| | GTCTCCAACAAAGCCCTCCCAGCCCCCATCGAGAAAACCATCTCCAAAGCCAAAGGG |
| | CAGCCCCGAGAACCACAGGTGTACACCCTGCCCCCATCCCGGGAGGAGATGACCAAG |
| | AACCAGGTCAGCCTGACCTGCCTGGTCAAAGGCTTCTATCCCAGCGACATCGCCGTG |
| | GAGTGGGAGAGCAATGGGCAGCCGGAGAACAACTACAAGACCACGCCTCCCGTGCTG |
| | GACTCCGACGGCTCCTTCTTCCTCTACAGCAAGCTCACCGTGGACAAGAGCAGGTGG |
| | CAGCAGGGGAACGTCTTCTCATGCTCCGTGATGCACGAGGCTCTGCACAACCACTAC |
| | ACGCAGAAGAGCCTCTCCCTGTCTCCGGGTAAAATCGATTTCTACACAGGAGTCTAT |
| | ATTCTGATCGGAGCCGGCGCCCTCATGATGCTGGTGGGCTTCCTGGGCTGCTGCGGG |
| | GCTGTGCAGGAGTCCCAGTGCAAAAAGAAGAAAAAGAAGAAGAAGACAAAGTGTGTA |
| | ATTATGTAA (SEQ ID NO: 311) |
| | >Artificial Sequence; hPDL1-Fc-CD9tm2-KRAS, Amino Acid |
| | MRIFAVFIFMTYWHLLNAFTVTVPKDLYVVEYGSNMTIECKFPVEKQLDLAALIVYW |
| | EMEDKNITQFVHGEEDLKVQHSSYRQRARLLKDQLSLGNAALQITDVKLQDAGVYRC |
| | MISYGGADYKRITVKVNAPYNKINQRILVVDPVTSEHELTCQAEGYPKAEVIWTSSD |
| | HQVLSGKTTTTNSKREEKLFNVTSTLRINTTTNEIFYCTFRRLDPEENHTAELVIPE |
| | LPLAHPPNERIDDKTHTCPPCPAPELLGGPSVFLFPPKPKDTLMISRTPEVTCVVVD |
| | VSHEDPEVKFNWYVDGVEVHNAKTKPREEQYNSTYRVVSVLTVLHQDWLNGKEYKCK |
| | VSNKALPAPIEKTISKAKGQPREPQVYTLPPSREEMTKNQVSLTCLVKGFYPSDIAV |
| | EWESNGQPENNYKTTPPVLDSDGSFFLYSKLTVDKSRWQQGNVFSCSVMHEALHNHY |
| | TQKSLSLSPGKIDFYTGVYILIGAGALMMLVGFLGCCGAVQESQCKKKEKKKKTKCV |
| | IM |
| | (SEQ ID NO: 312) |
| mPDL1-mFc- | >Artificial Sequence; mPDL1-mFc-CD9tm2, DNA |
| CD9tm2 | ATGAGGATATTTGCTGGCATTATATTCACAGCCTGCTGTCACTTGCTACGGGCGTTT |
| | ACTATCACGGCTCCAAAGGACTTGTACGTGGTGGAGTATGGCAGCAACGTCACGATG |
| | GAGTGCAGATTCCCTGTAGAACGGGAGCTGGACCTGCTTGCGTTAGTGGTGTACTGG |
| | GAAAAGGAAGATGAGCAAGTGATTCAGTTTGTGGCAGGAGAGGAGGACCTTAAGCCT |
| | CAGCACAGCAACTTCAGGGGGAGAGCCTCGCTGCCAAAGGACCAGCTTTTGAAGGGA |
| | AATGCTGCCCTTCAGATCACAGACGTCAAGCTGCAGGACGCAGGCGTTTACTGCTGC |
| | ATAATCAGCTACGGTGGTGCGGACTACAAGCGAATCACGCTGAAAGTCAATGCCCCA |
| | TACCGCAAAATCAACCAGAGAATTTCCGTGGATCCAGCCACTTCTGAGCATGAACTA |
| | ATATGTCAGGCCGAGGGTTATCCAGAAGCTGAGGTAATCTGGACAAACAGTGACCAC |
| | CAACCCGTGAGTGGGAAGAGAAGTGTCACCACTTCCCGGACAGAGGGGATGCTTCTC |
| | AATGTGACCAGCAGTCTGAGGGTCAACGCCACAGCGAATGATGTTTTCTACTGTACG |
| | TTTTGGAGATCACAGCCAGGGCAAAACCACACAGCGGAGCTGATCATCCCAGAACTG |
| | CCTGCAACACATCCTCCACAGAACAGGACTGGTTGTAAGCCTTGCATATGTACAGTC |
| | CCAGAAGTATCATCTGTCTTCATCTTCCCCCCAAAGCCCAAGGATGTGCTCACCATT |
| | ACTCTGACTCCTAAGGTCACGTGTGTTGTGGTAGACATCAGCAAGGATGATCCCGAG |
| | GTCCAGTTCAGCTGGTTTGTAGATGATGTGGAGGTGCACACAGCTCAGACGCAACCC |
| | CGGGAGGAGCAGTTCAACAGCACTTTCCGCTCAGTCAGTGAACTTCCCATCATGCAC |
| | CAGGACTGGCTCAATGGCAAGGAGTTCAAATGCAGGGTCAACAGTGCAGCTTTCCCT |
| | GCCCCCATCGAGAAAACCATCTCCAAAACCAAAGGCAGACCGAAGGCTCCACAGGTG |
| | TACACCATTCCACCTCCCAAGGAGCAGATGGCCAAGGATAAAGTCAGTCTGACCTGC |
| | ATGATAACAGACTTCTTCCCTGAAGACATTACTGTGGAGTGGCAGTGGAATGGGCAG |
| | CCAGCGGAGAACTACAAGAACACTCAGCCCATCATGGACACAGATGGCTCTTACTTC |
| | GTCTACAGCAAGCTCAATGTGCAGAAGAGCAACTGGGAGGCAGGAAATACTTTCACC |
| | TGCTCTGTGTTACATGAGGGCCTGCACAACCACCATACTGAGAAGAGCCTCTCCCAC |
| | TCTCCTGGTAAATTCTACACAGGAGTCTATATTCTGATCGGAGCCGGCGCCCTCATG |
| | ATGCTGGTGGGCTTCCTGGGCTGCTGCGGGGCTGTGCAGGAGTCCCAGTGCGTAATT |
| | ATGTAA |
| | (SEQ ID NO: 313) |
| | >Artificial Sequence; mPDL1-mFc-CD9tm2, Amino Acid |
| | MRIFAGIIFTACCHLLRAFTITAPKDLYVVEYGSNVTMECRFPVERELDLLALVVYW |
| | EKEDEQVIQFVAGEEDLKPQHSNFRGRASLPKDQLLKGNAALQITDVKLQDAGVYCC |
| | IISYGGADYKRITLKVNAPYRKINQRISVDPATSEHELICQAEGYPEAEVIWTNSDH |
| | QPVSGKRSVTTSRTEGMLLNVTSSLRVNATANDVFYCTFWRSQPGQNHTAELIIPEL |
| | PATHPPQNRTGCKPCICTVPEVSSVFIFPPKPKDVLTITLTPKVTCVVVDISKDDPE |
| | VQFSWFVDDVEVHTAQTQPREEQFNSTFRSVSELPIMHQDWLNGKEFKCRVNSAAFP |
| | APIEKTISKTKGRPKAPQVYTIPPPKEQMAKDKVSLTCMITDFFPEDITVEWQWNGQ |
| | PAENYKNTQPIMDTDGSYFVYSKLNVQKSNWEAGNTFTCSVLHEGLHNHHTEKSLSH |
| | SPGKFYTGVYILIGAGALPIMLVGFLGCCGAVQESQCVIM |
| | (SEQ ID NO: 314) |
| mPDL1-mFc- | >Artificial Sequence; mPDL1-mFc-CD9tm2-KRAS, DNA |
| CD9tm2- | ATGAGGATATTTGCTGGCATTATATTCACAGCCTGCTGTCACTTGCTACGGGCGTTT |
| modified KRAS | ACTATCACGGCTCCAAAGGACTTGTACGTGGTGGAGTATGGCAGCAACGTCACGATG |
| | GAGTGCAGATTCCCTGTAGAACGGGAGCTGGACCTGCTTGCGTTAGTGGTGTACTGG |
| | GAAAAGGAAGATGAGCAAGTGATTCAGTTTGTGGCAGGAGAGGAGGACCTTAAGCCT |
| | CAGCACAGCAACTTCAGGGGGAGAGCCTCGCTGCCAAAGGACCAGCTTTTGAAGGGA |
| | AATGCTGCCCTTCAGATCACAGACGTCAAGCTGCAGGACGCAGGCGTTTACTGCTGC |
| | ATAATCAGCTACGGTGGTGCGGACTACAAGCGAATCACGCTGAAAGTCAATGCCCCA |
| | TACCGCAAAATCAACCAGAGAATTTCCGTGGATCCAGCCACTTCTGAGCATGAACTA |
| | ATATGTCAGGCCGAGGGTTATCCAGAAGCTGAGGTAATCTGGACAAACAGTGACCAC |
| | CAACCCGTGAGTGGGAAGAGAAGTGTCACCACTTCCCGGACAGAGGGGATGCTTCTC |
| | AATGTGACCAGCAGTCTGAGGGTCAACGCCACAGCGAATGATGTTTTCTACTGTACG |
| | TTTTGGAGATCACAGCCAGGGCAAAACCACACAGCGGAGCTGATCATCCCAGAACTG |
| | CCTGCAACACATCCTCCACAGAACAGGACTGGTTGTAAGCCTTGCATATGTACAGIC |
| | CCAGAAGTATCATCTGTCTTCATCTTCCCCCCAAAGCCCAAGGATGTGCTCACCATT |
| | ACTCTGACTCCTAAGGTCACGTGTGTTGTGGTAGACATCAGCAAGGATGATCCCGAG |
| | GTCCAGTTCAGCTGGTTTGTAGATGATGTGGAGGTGCACACAGCTCAGACGCAACCC |
| | CGGGAGGAGCAGTTCAACAGCACTTTCCGCTCAGTCAGTGAACTTCCCATCATGCAC |
| | CAGGACTGGCTCAATGGCAAGGAGTTCAAATGCAGGGTCAACAGTGCAGCTTTCCCT |
| | GCCCCCATCGAGAAAACCATCTCCAAAACCAAAGGCAGACCGAAGGCTCCACAGGTG |
| | TACACCATTCCACCTCCCAAGGAGCAGATGGCCAAGGATAAAGTCAGTCTGACCTGC |
| | ATGATAACAGACTTCTTCCCTGAAGACATTACTGTGGAGTGGCAGTGGAATGGGCAG |
| | CCAGCGGAGAACTACAAGAACACTCAGCCCATCATGGACACAGATGGCTCTTACTTC |
| | GTCTACAGCAAGCTCAATGTGCAGAAGAGCAACTGGGAGGCAGGAAATACTTTCACC |
| | TGCTCTGTGTTACATGAGGGCCTGCACAACCACCATACTGAGAAGAGCCTCTCCCAC |
| | TCTCCTGGTAAATTCTACACAGGAGTCTATATTCTGATCGGAGCCGGCGCCCTCATG |
| | ATGCTGGTGGGCTTCCTGGGCTGCTGCGGGGCTGTGCAGGAGTCCCAGTGCAAAAAG |
| | AAGAAAAAGAAGAAGAAGACAAAGTGTGTAATTATGTAA |
| | (SEQ ID NO: 315) |
| | >Artificial Sequence; mPDL1-mFc-CD9tm2-KRAS, Amino Acid |
| | MRIFAGIIFTACCHLLRAFTITAPKDLYVVEYGSNVTMECREPVERELDLLALVVYW |
| | EKEDEQVIQFVAGEEDLKPQHSNERGRASLPKDQLLKGNAALQITDVKLQDAGVYCC |
| | IISYGGADYKRITLKVNAPYRKINQRISVDPATSEHELICQAEGYPEAEVIWTNSDH |
| | QPVSGKRSVTTSRTEGMLLNVTSSLRVNATANDVETCTEWRSQPGQNHTAELIIPEL |
| | PATHPPQNRTGCKPCICTVPEVSSVFIFPPKPKDVLTITLTPKVTCVVVDISKDDPE |
| | VQFSWFVDDVEVHTAQTQPREEQFNSTFRSVSELPIMHQDWLNGKEFKCRVNSAAFP |
| | APIEKTISKTKGRPKAPQVYTIPPPKEQMAKDKVSLTCMITDFFPEDITVEWQWNGQ |
| | PAENYKNTQPIMDTDGSYFVYSKLNVQKSNWEAGNTFTCSVLHEGLHNHHTEKSLSH |
| | SPGKFYTGVYILIGAGAILMMLVGFLGCCGAVQESQCKKKKEKKKTKCVIM |
| | (SEQ ID NO: 316) |

[0142] In some embodiments of any of the aspects, the fusion polypeptides provided herein comprise two or more POI domains. The specific combinations of POI domains can be used to regulate inflammatory immune responses. Non-limiting examples of additive and synergistic combinations of POIs that can modulate inflammatory signaling pathways are provided in Table 5 (below).

TABLE 5
Exemplary POI combinations and combined targets for modulating inflammation.

| | | PUTATIVE ADDITIVE or |
|---|---|---|
| POIs (LIGANDS) | COMBINED TARGETS | SYNERGISTIC MOA |
| PD-L1 or PD-L2 | PD-1 | Differential use of Shp |
| HVEM | BTLA | phosphatases. BTLA inhibits |
| | | both TCR and CD28 |
| | | phosphorylation (via Shp1) |
| | | while PD-1 inhibits CD28 |
| | | phosphorylation (via Shp2). |
| PD-L1 or PD-L2 | PD-1 | LAG-3 exerts differential |
| FGL1 | LAG-3 | inhibitory impacts on various |
| | | types of lymphocytes and |
| | | shows synergy with PD-1 to |
| | | inhibit immune responses. |
| PD-L1 or PD-L2 | PD-1 | PD-1 and Tim-3 have non- |
| CEACAM-1 or GAL9 | TIM-3 | redundant downstream |
| | | signaling mechanisms. |
| PD-L1 or PD-L2 | PD-1 | Differential use of Shp |
| CD155 | TIGIT | phosphatases. Non-redundantly |
| | | regulate T cell responses. |
| PD-L1 or PD-L2 | PD-1 | PD-1 and VISTA non- |
| VSIG3 | VISTA | redundantly regulate T cell |
| | | responses. VISTA contains |
| | | cytosolic SH3 binding domains |
| | | for adapter proteins. |
| CEACAM-1 or GAL9 | TIM-3 | TIGIT and TIM-3 have non- |
| CD155 | TIGIT | redundant downstream |
| | | signaling mechanisms. |
| PD-L1 or PD-L2 | PD-1 | PD-1, LAG-3 and TIM-3 have |
| FGL1 | LAG-3 | non-redundant downstream |
| CEACAM-1 or GAL9 | TIM-3 | signaling mechanisms. |

### Methods of Preparing Extracellular Vesicle Compositions

[0143] In another aspect, provided herein is a method of preparing an engineered extracellular vesicle provided herein. Generally, the method comprises providing a population of cells expressing a vector construct encoding one or more sticky binder (vesicle targeting domain) and one or more signaling domains (POI domain).

[0144] The EVs provided herein can be isolated and purified form any biological source, e.g., cells. The cells that produce the engineered EVs provided herein can be from any viable non-human source or organism. Usually the organism is an animal, vertebrate, or mammal. In some embodiments, the cell described herein is from a human. The cells described herein can be from any tissue isolated from an organism by methods known in the art. The scientific literature provides guidance for one of ordinary skill in the art to isolate, prepare, and culture cells as necessary for use in the compositions and methods described herein. One of skill in the art can appreciate that the cell source of the EVs may alter the cellular protein expression and the native or endogenous cargo within the EV. It is contemplated herein that this can be leveraged for therapeutic effect depending on the disease or disorder being treated.

[0145] In some embodiments, the population of cells has been altered by exposure to environmental conditions (e.g., hypoxia), small molecule addition, presence/absence of exogenous factors (e.g., growth factors, cytokines) at the time, or substantially contemporaneous with, isolating the plurality of artificial synapses in a manner altering the regulatory state of the cell. In various embodiments, the cells are HEK 293 cells, MSCs, PERC, fibrosarcoma HT-1080 or HuH7 cell lines.

[0146] The method comprises providing a population of cells and culturing the cells in serum-free or un-concentrated conditioned medium. This includes, for example, artificial synapses secreted into media as conditioned by a population of cells in culture, further including cell lines capable of serial passaging. In certain embodiments, the cells in culture are grown to 10, 20, 30, 40, 50, 60, 70, 80, 90, or 90% or more confluency when artificial synapses (engineered EVs) are isolated.

[0147] The methods provided herein further comprise contacting the cells provided herein with a nucleic acid vector encoding the at least one fusion polypeptide provided herein. The vector can be added to the cell culture medium of the cells by methods known in the art and discussed further below.

[0148] A vector is a nucleic acid construct designed for delivery to a host cell or for transfer of genetic material between different host cells. As used herein, a vector can be viral or non-viral. The term “vector” encompasses any genetic element that is capable of replication when associated with the proper control elements and that can transfer genetic material to cells. A vector can include, but is not limited to, a cloning vector, an expression vector, a plasmid, phage, transposon, cosmid, artificial chromosome, virus, virion, etc. In some embodiments of any of the aspects, the vector is selected from the group consisting of: a plasmid, a cosmid and a viral vector.

[0149] “Expression” refers to the cellular processes involved in producing RNA and proteins and as appropriate, secreting proteins, including where applicable, but not limited to, for example, transcription, transcript processing, translation and protein folding, modification and processing. “Expression products” include RNA transcribed from a gene, and polypeptides obtained by translation of mRNA transcribed from a gene.

[0150] In some embodiments, a vector is capable of driving expression of one or more sequences in a mammalian cell; i.e., the vector is a mammalian expression vector. Examples of mammalian expression vectors include pCDM8 (Seed, 1987. Nature 329: 840) and pMT2PC (Kaufman, et al., 1987. EMBO J. 6: 187-195). When used in mammalian cells, the expression vector's control functions are typically provided by one or more regulatory elements. For example, commonly used promoters are derived from polyoma, adenovirus 2, cytomegalovirus, simian virus 40, and others disclosed herein and known in the art. For other suitable expression systems for both prokaryotic and eukaryotic cells see, e.g., Chapters 16 and 17 of Sambrook, et al., MOLECULAR CLONING: A LABORATORY MANUAL. 2nd ed., Cold Spring Harbor Laboratory, Cold Spring Harbor Laboratory Press, Cold Spring Harbor, N.Y., 1989.

[0151] In some embodiments, the recombinant expression vector is capable of directing expression of the exogenous fusion polypeptide nucleic acid sequence preferentially in a particular cell type (e.g., via tissue-specific regulatory elements).

[0152] Tissue-specific and inducible regulatory elements are known in the art. Non-limiting examples of suitable tissue-specific promoters include the albumin promoter (liver-specific; Pinkert, et al., 1987. Genes Dev. 1: 268-277), lymphoid-specific promoters (Calame and Eaton, 1988. Adv. hnmunol. 43: 235-275), in particular promoters of T cell receptors (Winoto and Baltimore, 1989. EMBO J. 8: 729-733) and immunoglobulins (Baneiji, et al., 1983. Cell 33: 729-740; Queen and Baltimore, 1983. Cell 33: 741-748), neuron-specific promoters (e.g., the neurofilament promoter; Byrne and Ruddle, 1989. Proc. Natl. Acad. Sci. USA 86: 5473-5477), pancreas-specific promoters (Edlund, et al., 1985. Science 230: 912-916), and mammary gland-specific promoters (e.g., milk whey promoter; U.S. Pat. No. 4,873,316 and European Application Publication No. 264,166). Developmentally-regulated promoters are also encompassed, e.g., the murine hox promoters (Kessel and Gruss, 1990. Science 249: 374-379) and the a-fetoprotein promoter (Campes and Tilghman, 1989. Genes Dev. 3: 537-546).

[0153] In some embodiments, the at least one nucleic acid sequence described herein is delivered to the cell described herein via an integrating vector. Integrating vectors have their delivered genetic material (or a copy of it) permanently incorporated into a host cell chromosome. Non-integrating vectors remain episomal which means the nucleic acid contained therein is never integrated into a host cell chromosome. Examples of integrating vectors include retroviral vectors, lentiviral vectors, hybrid adenoviral vectors, and herpes simplex viral vectors.

[0154] In some embodiments, the at least one nucleic acid sequence described herein is delivered to the cell described herein via a non-integrative vector. Non-integrative vectors include non-integrative viral vectors. Non-integrative viral vectors eliminate one of the primary risks posed by integrative retroviruses, as they do not incorporate their genome into the host DNA. One example is the Epstein Barr oriP/Nuclear Antigen-1 (“EBNA1”) vector, which is capable of limited self-replication and known to function in mammalian cells. Containing two elements from Epstein-Barr virus, oriP and EBNA1, binding of the EBNA1 protein to the virus replicon region oriP maintains a relatively long-term episomal presence of plasmids in mammalian cells. This particular feature of the oriP/EBNA1 vector makes it ideal for generation of integration-free host cells. Other non-integrative viral vectors include adenoviral vectors and the adeno-associated viral (AAV) vectors.

[0155] Another non-integrative viral vector is RNA Sendai viral vector, which can produce protein without entering the nucleus of an infected cell. The F-deficient Sendai virus vector remains in the cytoplasm of infected cells for a few passages, but is diluted out quickly and completely lost after several passages (e.g., 10 passages). This permits a self-limiting transient expression of a chosen heterologous gene or genes in a target cell. This aspect can be helpful, e.g., for the transient introduction of reprogramming factors, among other uses. As noted above, in some embodiments, the nucleic acid sequence described herein is expressed in the cells from a viral vector.

[0156] A “viral vector” includes a nucleic acid vector construct that includes at least one element of viral origin and has the capacity to be packaged into a viral vector particle. The viral vector can contain a nucleic acid encoding a polypeptide described herein in place of non-essential viral genes. The vector and/or particle can be utilized for the purpose of transferring nucleic acids into cells either in vitro or in vivo.

[0157] The nucleic acids described herein can be delivered using any transfection reagent or other physical means that facilitates entry of nucleic acids into a cell. Methods of non-viral delivery of nucleic acids include lipofection, nucleofection, microinjection, electroporation, biolistics, virosomes, liposomes, immunoliposomes, polycation or lipid:nucleic acid conjugates, naked DNA, artificial virions, and agent-enhanced uptake of DNA. Lipofection is described in e.g., U.S. Pat. Nos. 5,049,386, 4,946,787; and 4,897,355) and lipofection reagents are sold commercially (e.g., Transfectam™ and Lipofectin™). Cationic and neutral lipids that are suitable for efficient receptor-recognition lipofection of polynucleotides include those of Felgner, WO 91/17424; WO 91/16024. Delivery can be to cells (e.g. in vitro or ex vivo administration) or target tissues (e.g. in vivo administration).

[0158] The preparation of lipid:nucleic acid complexes, including targeted liposomes such as immunolipid complexes, is well known to one of skill in the art (see, e.g., Crystal, Science 270:404-410 (1995); Blaese et al., Cancer Gene Ther. 2:291-297 (1995); Behr et al., Bioconjugate Chem. 5:382-389 (1994); Remy et al., Bioconjugate Chem. 5:647-654 (1994); Gao et al., Gene Therapy 2:710-722 (1995); Ahmad et al., Cancer Res. 52:4817-4820 (1992); U.S. Pat. Nos. 4,186,183, 4,217,344, 4,235,871, 4,261,975, 4,485,054, 4,501,728, 4,774,085, 4,837,028, and 4,946,787).

[0159] An “agent that increases cellular uptake” is a molecule that facilitates transport of a molecule, e.g., nucleic acid, or peptide or polypeptide, or other molecule that does not otherwise efficiently transit the cell membrane across a lipid membrane. For example, a nucleic acid can be conjugated to a lipophilic compound (e.g., cholesterol, tocopherol, etc.), a cell penetrating peptide (CPP) (e.g., penetratin, TAT, Syn1B, etc.), or a polyamine (e.g., spermine). Further examples of agents that increase cellular uptake are disclosed, for example, in Winkler (2013). Oligonucleotide conjugates for therapeutic applications. Ther. Deliv. 4(7); 791-809. The one or more nucleic acid sequences encoding the fusion polypeptides provided herein can be delivered to the cell by any method discussed above or known in the art.

[0160] In some embodiments of any of the aspects, the vectors provided herein comprise a nucleic acid modification by methods known in the art. In some embodiments, the cell can be genetically manipulated to express one or more vectors, each encoding one or more vesicle targeting domains and/or one or more signaling domains. In certain embodiments, the population of cells has been genetically manipulated. This includes, for example, knockout (KO) or transgenic (TG) cell lines, wherein an endogenous gene has been removed and/or an exogenous introduced in a stable, persistent manner. In certain embodiments, this further includes transient knockdown of one or more genes and associated coding and non-coding transcripts within the population of cells, via any number of methods known in the art, such as introduction of dsRNA, siRNA, microRNA, etc. This further includes transient expression of one or more genes and associated coding and non-coding transcripts within the population of cells, via any number of methods known in the art, such as introduction of a vector, plasmid, artificial plasmid, replicative and/or non-replicative virus, etc.

[0161] In certain embodiments the cell population has been manipulated to knockout the expression of one or more endogenous gene sequences that encode for metalloendopeptidases. In certain embodiments the cell population has been manipulated to knockout the expression of one or more endogenous gene sequences that code for metalloproteinases. In certain embodiments the cell population has been manipulated to knockout the expression of one or more endogenous gene sequences that encode for a disintegrin and metalloproteinase (ADAM). For example, the cell population can be manipulated to knock of the expression of one or more gene sequences that encode for ADAM1, ADAM2, ADAM7, ADAM8, ADAM9, ADAM10, ADAM11, ADAM12, ADAM15, ADAM17, ADAM18, ADAM19, ADAM20, ADAM21, ADAM22, ADAM23, ADAM28, ADAM29, ADAM30, ADAM33, etc.

[0162] In certain embodiments the cell population has been manipulated to knockout the expression of one or more endogenous genes that encode for enzymes that hydrolyze the inositol phosphate linkage in proteins anchored by phosphatidylinositol glycans, thereby preventing the release of proteins attached to the plasma membrane via GPI anchors. For example, the cell population can be manipulated to knock of the expression of phosphatidylinositol-glycan-specific phospholipase D (GPLD1).

[0163] In certain embodiments, the population of cells has been genetically manipulated. This includes, for example, knock-in of an exogenous genetic sequence, wherein the exogenous genetic sequence is expressed in a stable, persistent manner. In certain embodiments, the cell population has been manipulated to knock-in recombinase recognition sequences (e.g., FRT), transgenic reporters such as antibiotic resistance genes, fluorescent or enzymatic reporter genes, etc. or the like.

[0164] In some embodiments, the method comprises a step of isolating the engineered extracellular vesicles provided herein. Particulates within the medium are removed by a series of specific centrifugation steps and the media is filtered. The general method of isolating extracellular vesicles as provided herein is depicted in FIG. 21 of the working examples. Methods of isolating and purifying the extracellular vesicles and exosomes are known in the art and further described, e.g., in Whitford W, Guterstam P. Exosome manufacturing status. Future Med Chem. 2019 May; 11(10):1225-1236. doi: 10.4155/fmc-2018-0417. PMID: 31280675, Patel D B, Santoro M, Born L J, Fisher J P, Jay S M. Towards rationally designed biomanufacturing of therapeutic extracellular vesicles: impact of the bioproduction microenvironment. Biotechnol Adv. 2018 December; 36(8):2051-2059. doi: 10.1016/j.biotechadv.2018.09.001. Epub 2018 Sep. 12. PMID: 30218694; PMCID: PMC6250573, Ng K S, Smith J A, McAteer M P, Mead B E, Ware J, Jackson F O, Carter A, Ferreira L, Bure K, Rowley J A, Reeve B, Brindley D A, Karp J M. Bioprocess decision support tool for scalable manufacture of extracellular vesicles. Biotechnol Bioeng. 2019 February; 116(2):307-319. doi: 10.1002/bit.26809. Epub 2018 Nov. 8. PMID: 30063243; PMCID: PMC6322973, Paganini C, Capasso Palmiero U, Pocsfalvi G, Touzet N, Bongiovanni A, Arosio P. Scalable Production and Isolation of Extracellular Vesicles: Available Sources and Lessons from Current Industrial Bioprocesses. Biotechnol J. 2019 October; 14(10):e1800528. doi: 10.1002/biot.201800528. Epub 2019 Jul. 8. PMID: 31140717, which are incorporated herein by reference in their entireties.

[0165] In some embodiments, isolating the plurality of engineered EVs (artificial synapses) includes precipitation, centrifugation, filtration, immuno-separation, tangential flow, liquid chromatography, and/or flow fractionation. For example, differential ultracentrifugation has become a technique wherein secreted exosomes are isolated from the supernatants of cultured cells. This approach allows for separation of exosomes from non-membranous particles, by exploiting their relatively low buoyant density. Size exclusion allows for their separation from biochemically similar, but biophysically different microvesicles, which possess larger diameters of up to 1,000 nm. Differences in floatation velocity further allows for separation of differentially sized exosomes. In general, exosome sizes will possess a diameter ranging from 30-300 nm, including sizes of 30-150 nm. Further purification may rely on specific properties of the particular exosomes of interest. This includes, for example, use of immunoadsorption with a protein of interest to select specific vesicles with exoplasmic or outward orientations.

[0166] Among current methods (differential centrifugation, discontinuous density gradients, immunoaffinity, ultrafiltration and liquid chromatography (e.g., fast protein liquid chromatography (FPLC)), differential ultracentrifugation is the most commonly used for exosome isolation. This technique utilizes increasing centrifugal force from 2000×g to 10,000×g to separate the medium- and larger-sized particles and cell debris from the exosome pellet at 100,000×g. Centrifugation alone allows for significant separation/collection of exosomes from a conditioned medium, although it is insufficient to remove various protein aggregates, genetic materials, particulates from media and cell debris that are common contaminants. Enhanced specificity of exosome purification may deploy sequential centrifugation in combination with ultrafiltration, or equilibrium density gradient centrifugation in a sucrose density gradient, to provide for the greater purity of the exosome preparation (flotation density 1.1-1.2 g/ml) or application of a discrete sugar cushion in preparation.

[0167] Ultrafiltration can be used to purify exosomes without compromising their biological activity. Membranes with different pore sizes—such as 100 kDa molecular weight cut-off (MWCO) or 300 kDa MWCO and gel filtration to eliminate smaller particles—have been used to avoid the use of a nonneutral pH or non-physiological salt concentration. Currently available tangential flow filtration (TFF) systems are scalable (to >10,000 L), allowing one to not only purify, but concentrate the exosome fractions, and such approaches are less time consuming than differential centrifugation. Liquid Chromatography can also be used to purify exosomes to homogeneously sized particles and preserve their biological activity as the preparation is maintained at a physiological pH and salt concentration.

[0168] Other chemical methods have exploit differential solubility of exosomes for precipitation techniques, addition to volume-excluding polymers (e.g., polyethylene glycols (PEGs)), possibly combined additional rounds of centrifugation or filtration. For example, a precipitation reagent, ExoQuick®, can be added to conditioned cell media to quickly and rapidly precipitate a population of exosomes, although re-suspension of pellets prepared via this technique may be difficult. Flow field-flow fractionation (FlFFF) is an elution-based technique that is used to separate and characterize macromolecules (e.g., proteins) and nano- to micro-sized particles (e.g., organelles and cells) and which has been successfully applied to fractionate exosomes from culture media.

[0169] Beyond these techniques relying on general biochemical and biophysical features, focused techniques may be applied to isolated specific exosomes of interest. This includes relying on antibody immunoaffinity to recognizing certain exosome-associated antigens. Conjugation to magnetic beads, chromatography matrices, plates or microfluidic devices allows isolating of specific exosome populations of interest as may be related to their production from a parent cell of interest or associated cellular regulatory state. Other affinity-capture methods use lectins which bind to specific saccharide residues on the exosome surface.

[0170] In several embodiments, isolating a plurality of artificial synapses from the population of cells includes centrifugation of the cells and/or media conditioned by the cells. In several embodiments, ultracentrifugation is used. In several embodiments, isolating a plurality of artificial synapses from the population of cells is via size-exclusion filtration. In other embodiments, isolating a plurality of artificial synapses from the population of cells includes use of discontinuous density gradients, immunoaffinity, ultrafiltration, tangential flow and/or liquid chromatography.

[0171] In certain embodiments, differential ultracentrifugation includes using centrifugal force from 1000-2000×g, 2000-3000×g, 3000-4000×g, 4000-5000×g, 5000×g-6000×g, 6000-7000×g, 7000-8000×g, 8000-9000×g, 9000-10,000×g, to 10,000×g or more to separate larger-sized particles from a plurality of artificial synapses derived from the cells.

[0172] In other embodiments, isolating a plurality of artificial synapses from the population of cells includes use of filtration or ultrafiltration. In certain embodiments, a size exclusion membrane with different pore sizes is used. For example, a size exclusion membrane can include use of a filter with a pore size of 0.1-0.5 micron (μm), 0.5-1.0 μm, 1-2.5 μm, 2.5-5 μm, 5 or more μm. In certain embodiments, the pore size is about 0.2 μm. In certain embodiments, filtration or ultrafiltration includes size exclusion ranging from 100-500 daltons (Da), 500-1 kDa, 1-2 kDa, 2-5 kDa, 5-10 kDa, 10-25 kDa, 25-50 kDa, 50-100 kDa, 100-250 kDa, 250-500 kDa, 500 or more kDa. In certain embodiments, the size exclusion is for about 2-5 kDa. In certain embodiments, the size exclusion is for about 3 kDa. In other embodiments, filtration or ultrafiltration includes size exclusion includes use of hollow fiber membranes capable of isolating particles ranging from 100-500 daltons (Da), 500-1 kDa, 1-2 kDa, 2-5 kDa, 5-10 kDa, 10-25 kDa, 25-50 kDa, 50-100 kDa, 100-250 kDa, 250-500 kDa, 500 or more kDa. In certain embodiments, the size exclusion is for about 2-5 kDa. In certain embodiments, the size exclusion is for about 3 kDa. In other embodiments, a molecular weight cut-off (MWCO) gel filtration capable of isolating particles ranging from 100-500 daltons (Da), 500-1 kDa, 1-2 kDa, 2-5 kDa, 5-10 kDa, 10-25 kDa, 25-50 kDa, 50-100 kDa, 100-250 kDa, 250-500 kDa, 500 or more kDa. In certain embodiments, the size exclusion is for about 2-5 kDa. In certain embodiments, the size exclusion is for about 3 kDa. In various embodiments, such systems are used in combination with variable fluid flow systems. In certain embodiments, a size exclusion membrane with different pore sizes is used to purify extracellular vesicles from a solution comprising undesirable proteins or nucleic acids.

[0173] In other embodiments, isolating a plurality of artificial synapses from the population of cells includes use of tangential flow filtration (TFF) systems are used purify and/or concentrate the exosome fractions. In other embodiments, isolating a plurality of artificial synapses from the population of cells includes use of liquid chromatography can also be used to purify artificial synapses to homogeneously sized particles. In various embodiments, density gradients as used, such as centrifugation in a sucrose density gradient or application of a discrete sugar cushion in preparation.

[0174] In other embodiments, isolating a plurality of artificial synapses from the population of cells includes use of a precipitation reagent. For example, a precipitation reagent, ExoQuick®, can be added to conditioned cell media to quickly and rapidly precipitate a population of artificial synapses. In other embodiments, isolating a plurality of artificial synapses from the population of cells includes use of volume-excluding polymers (e.g., polyethylene glycols (PEGs)) are used. In another embodiment, isolating a plurality of artificial synapses from the population of cells includes use of flow field-flow fractionation (FlFFF), an elution-based technique.

[0175] In certain embodiments, isolating a plurality of artificial synapses from the population of cells includes use of one or more capture agents to isolate one or more artificial synapses possessing specific biomarkers or containing particular biological molecules. In one embodiment, one or more capture agents include at least one antibody. For example, antibody immunoaffinity recognizing exosome-associated antigens is used to capture specific artificial synapses. In other embodiments, the at least one antibody are conjugated to a fixed surface, such as magnetic beads, chromatography matrices, plates or microfluidic devices, thereby allowing isolation of the specific exosome populations of interest. In other embodiments, isolating a plurality of artificial synapses from the population of cells includes use of one or more capture agents that is not an antibody. This includes, for example, use of a “bait” molecule presenting an antigenic feature complementary to a corresponding molecule of interest on the exosome surface, such as a receptor or other coupling molecule. In one embodiment, the non-antibody capture agent is a lectin capable of binding to polysaccharide residues on the exosome surface.

[0176] In other embodiments, isolating a plurality of artificial synapses from the population of cells includes use of ion exchange chromatography. In other embodiments, isolating a plurality of artificial synapses from the population of cells includes use of anion exchange chromatography. In other embodiments, isolating a plurality of artificial synapses from the population of cells includes use of caion exchange chromatography. In certain embodiments, ion exchange chromatography comprises a chromatography resin with a functional group selected from the group consisting of diethylaminoethyl (DEAE), quaternary aminoethyl (QAE), quaternary ammonium (Q), carboxymethyl (CM), sulfopropyl (SP), or methyl sulfate (S). In certain embodiments, ion exchange chromatography comprises a chromatography resin which may have properties of a weak acid, strong acid, weak base, or strong basic. In certain embodiments, ion exchange chromatography comprises a chromatography selected from the group consisting of DEAE cellulose, DEAE Sephadex, Mono Q, Mini Q, HiTrap Capto, Capto Core 700, HiPrep Q, QAE Sephadex, Q Sepharose, CM Cellulose, SP Sepharose, SOURCE S, EAH-Sepharose, sulfoxyethyl cellulose, CM Sephadex, or CM Sepharose. Isolating a plurality of artificial synapses can be prepared by any of a variety of ion exchange chromatography techniques that are known in the art.

[0177] In other embodiments, isolating a plurality of artificial synapses from the population of cells includes use of a nuclease enzyme (e.g., a DNase or RNase). For example, a working concentration of Benzonase® nuclease may be added to an extracellular vesicle sample preparation in the presence of a divalent cation, for example 1-2 mM Mg2⁺, 2-5 mM Mg2⁺, 10-20 mM Mg2⁺, 20-50 mM Mg2⁺, 50-100 mM Mg2⁺, or more than 100 mM Mg2⁺.

[0178] Following isolation and purification of the engineered EVs provided herein, EVs can be further evaluated for the desired structural and functional properties by methods known in the art. For example, the engineered exosomes provided herein can be assayed for functional activity on a target cell using a cell-based bioassays (e.g., those commercially available, Promega DiscoverX®), ligand-receptor binding assays, vesicle flow cytometric assays, enzyme-linked immunosorbent assays, tunable resistive pulse sensing (TRPS), nanoparticle tracking analysis (NTA), surface plasmon resonance (SSPR), nucleotide sequencing, lipidomics, proteomics, colorimetric assays, fluorescence assays, luminescence assays, immunoblotting, radioimmunoassays, electron microscopy, or EV automated analysis (e.g., Exoview®). Additional methods of characterizing EVs are found, e.g., in Zhang Y, Bi J, Huang J, Tang Y, Du S, Li P. Exosome: A Review of Its Classification, Isolation Techniques, Storage, Diagnostic and Targeted Therapy Applications. Int J Nanomedicine. 2020 Sep. 22; 15:6917-6934. doi: 10.2147/IJN.S264498. PMID: 33061359; PMCID: PMC7519827, Kluszczynska K, Czemek L, Cypryk W, Peczek L, Duchler M. Methods for the Determination of the Purity of Exosomes. Curr Pharm Des. 2019; 25(42):4464-4485. doi: 10.2174/1381612825666191206162712. PMID: 31808383, Nolan J P, Duggan E. Analysis of Individual Extracellular Vesicles by Flow Cytometry. Methods Mol Biol. 2018; 1678:79-92. doi: 10.1007/978-1-4939-7346-0_5. PMID: 29071676.; Doyle L M, Wang M Z. Overview of Extracellular Vesicles, Their Origin, Composition, Purpose, and Methods for Exosome Isolation and Analysis. Cells. 2019 Jul. 15; 8(7):727. doi: 10.3390/cells8070727. PMID: 31311206; PMCID: PMC6678302, Pugholm L H, Revenfeld A L, Sendergaard E K, Jørgensen MM. Antibody-Based Assays for Phenotyping of Extracellular Vesicles. Biomed Res Int. 2015; 2015:524817. doi: 10.1155/2015/524817. Epub 2015 Dec. 3. PMID: 26770974; PMCID: PMC4681819, Shao H, Im H, Castro C M, Breakefield X, Weissleder R, Lee H. New Technologies for Analysis of Extracellular Vesicles. Chem Rev. 2018 Feb. 28; 118(4):1917-1950. doi: 10.1021/acs.chemrev.7b00534. Epub 2018 Jan. 31. PMID: 29384376; PMCID: PMC6029891, which are incorporated herein by reference in their entireties.

### Pharmaceutical Compositions

[0179] Provided herein are compositions comprising the engineered extracellular vesicles (artificial synapses) provided herein.

[0180] In one aspect, provided herein is a composition comprising: a plurality of the engineered extracellular vesicles provided herein. In some embodiments of any of the aspects, the compositions and engineered EVs provided herein further comprise a pharmaceutically acceptable carrier.

[0181] For clinical use of the methods and compositions described herein, administration of the engineered EVs/artificial synapses provided herein can include formulation into pharmaceutical compositions or pharmaceutical formulations for parenteral administration, e.g., intravenous; mucosal, e.g., intranasal; ocular, or other mode of administration. In some embodiments, the engineered EVs described herein can be administered along with any pharmaceutically acceptable carrier compound, material, or composition which results in an effective treatment in the subject. Thus, a pharmaceutical formulation for use in the methods described herein can contain the engineered EVs described herein in combination with one or more pharmaceutically acceptable ingredients. The phrase “pharmaceutically acceptable” refers to those compounds, materials, compositions, and/or dosage forms which are, within the scope of sound medical judgment, suitable for use in contact with the tissues of human beings and animals without excessive toxicity, irritation, allergic response, or other problem or complication, commensurate with a reasonable benefit/risk ratio. The phrase “pharmaceutically acceptable carrier” as used herein means a pharmaceutically acceptable material, composition or vehicle, such as a liquid or solid filler, diluent, excipient, solvent, media, encapsulating material, manufacturing aid (e.g., lubricant, talc magnesium, calcium or zinc stearate, or steric acid), or solvent encapsulating material, involved in maintaining the stability, solubility, or activity of, an engineered EV as described herein. Each carrier must be “acceptable” in the sense of being compatible with the other ingredients of the formulation and not injurious to the patient. The terms “excipient,” “carrier,” “pharmaceutically acceptable carrier” or the like are used interchangeably herein.

[0182] The engineered EVs provided herein can be formulated for administration of the compound to a subject in solid, liquid, or gel form, including those adapted for the following: (1) parenteral administration, for example, by subcutaneous, intramuscular, intravenous or epidural injection as, for example, a sterile solution or suspension, or sustained-release formulation; (2) transdermally; (3) transmucosally; (4) via bronchoalveolar lavage.

[0183] In some embodiments, the compositions described herein comprise a particle or polymer-based vehicle. Exemplary particle or polymer-based vehicles include, but are not limited to, nanoparticles, microparticles, polymer microspheres, or polymer-drug conjugates.

[0184] In one embodiment of any of the aspects, the compositions described herein further comprise a lipid vehicle. Exemplary lipid vehicles include, but are not limited to, liposomes, phospholipids, micelles, lipid emulsions, and lipid-drug complexes.

[0185] Formulations can be adapted for delivery to the airway, e.g., to address respiratory inflammation. Such formulations can be adapted for delivery as an aerosol, e.g., for inhalation. In some embodiments, the compositions described herein are formulated for aerosol administration, nebulizer administration, tracheal lavage administration, or for a pulmonary delivery device.

[0186] As used herein, the term “pulmonary delivery device” refers to a device used to deliver a therapeutic dose of a composition of the present invention to the respiratory system including, but not limited to, a nebulizer, metered-dose inhaler, or dry powder inhaler.

[0187] Examples of nebulizers include, but are not limited to, soft mist inhalers (for example Respimat® Boehringer Ingelheim) jet nebulizers (use compressed gas or air), ultrasonic nebulizers (produce aerosols using a piezoelectric crystal vibrating at high frequencies), and vibrating mesh nebulizers.

[0188] As used herein, the term “jet nebulizer” refers to a device that flows compressed air or gas through a composition of the present invention for aerosolization. The aerosolized composition of the present invention may be inhaled by a patient. Jet nebulizer may include, but is not limited to, jet nebulizers with a corrugated tube, jet nebulizers with a collection bag, breath enhanced jet nebulizers, breath actuated jet nebulizers, and metered-dose inhalers. Examples of jet nebulizers include, but are not limited to, Circulaire (Westmed INC, Tucson, Ariz.), Pari Inhalierboy (PARI, Midlothian, Va.), Pari LC Plus (PARI, Midlothian, Va.), NebuTech (Salter Labs, Arvin, Calif.), AeroEclipse (Monoghan/Trudell Medical International, London, Ontario, Canada), and Maxin MA-2 (MA-2; Clinova Medical AB, Malmö, Sweden). Examples of ultrasonic nebulizers include, but are not limited to, DeVilbiss-Pulmosonic (Somerset, Pa.), Omron-Microair (Omron, Kyoto, Japan), Omron NE-U17 (Omron, Kyoto, Japan), Rhone Poulenc-Rorer-Fisoneb (Sanofi, Paris, France), and Beurer Nebulizer IH30 (Beurer GmbH, Neu-Ulm, Germany).

[0189] As used herein, the term “mesh nebulizer” refers to forcing a liquid, gel, fluid, solution, tincture, or the like through apertures in a mesh or aperture plate to generate aerosol. Mesh nebulizer may include, but is not limited to, active mesh nebulizers and passive mesh nebulizers. Examples of active mesh nebulizers include, but is not limited to, Aeroneb® (Aerogen, Galway, Ireland) and eFlow® (PARI, Midlothian, Va.). Examples of passive mesh nebulizers are, but not limited to, I-neb (Philips Respironics, Newark, USA), AKITA (Activaero, Gemunden/Wohra, Germany), and Microair NE-U22® (Omron, Kyoto, Japan).

[0190] For use as aerosols, the compositions described herein can be prepared in a solution or suspension and may be packaged in a pressurized aerosol container together with suitable propellants, for example, hydrocarbon propellants like propane, butane, or isobutane with conventional excipients.

[0191] The engineered EVs provided herein can also be administered in a non-pressurized form such as in a nebulizer or atomizer that reduces a liquid to a fine spray. Preferably, by such nebulization small liquid droplets of uniform size are produced from a larger body of liquid in a controlled manner. Nebulization can be achieved by any suitable means therefor, including by using many nebulizers known and marketed today. For example, an AEROMIST™ pneumatic nebulizer available from Inhalation Plastic, Inc. of Niles, Ill.

[0192] When the active ingredients are adapted to be administered, either together or individually, via nebulizer(s) they can be in the form of a nebulized aqueous suspension or solution, with or without a suitable pH or tonicity adjustment, either as a unit dose or multi-dose device.

[0193] Furthermore, any suitable gas can be used to apply pressure during the nebulization, with preferred gases to date being those which are chemically inert. Exemplary gases including, but are not limited to, nitrogen, argon, or helium can be used to advantage.

[0194] In some embodiments, the compositions described herein can also be administered directly to the airways in the form of a dry powder. Thus, the engineered EVs can be administered via an inhaler. Exemplary inhalers include metered dose inhalers and dry powdered inhalers.

[0195] A metered dose inhaler or “MDI” is a pressure resistant canister or container filled with a product such as a pharmaceutical composition dissolved in a liquefied propellant or micronized particles suspended in a liquefied propellant. The propellants which can be used include chlorofluorocarbons, hydrocarbons or hydrofluoroalkanes. Commonly used propellants are P134a (tetrafluoroethane) and P227 (heptafluoropropane) each of which may be used alone or in combination. They are optionally used in combination with one or more other propellants and/or one or more surfactants and/or one or more other excipients, for example ethanol, a lubricant, an anti-oxidant and/or a stabilizing agent.

[0196] As used herein, the term “dry powder inhaler” refers to a device that delivers a therapeutic dose of a composition of the present invention in a powdered form without propellants to the respiratory system. A dry powder inhaler (i.e., Turbuhaler™ (Astra AB)) is a system operable with a source of pressurized air to produce dry powder particles of a pharmaceutical composition that is compacted into a very small volume. Examples of dry powder inhalers include, but are not limited to, Spinhaler® (Fisons Pharmaceuticals, Rochester, N.Y.), Rotahaler® (GlaxoSmithKline, NC), Turbuhaler® (AstraZeneca, UK), and Diskhaler® (GlaxoSmithKline, NC).

[0197] Dry powder aerosols for inhalation therapy are generally produced with mean diameters primarily in the range of <5 μm. As the diameter of particles exceeds 3 μm, there is increasingly less phagocytosis by macrophages. However, increasing the particle size also has been found to minimize the probability of particles (possessing standard mass density) entering the airways and acini due to excessive deposition in the oropharyngeal or nasal regions.

[0198] Suitable powder compositions include, by way of illustration, powdered preparations including the engineered EVs described herein. These can be intermixed with lactose, or other inert powders acceptable for intrabronchial administration. The powder compositions can be administered via an aerosol dispenser or encased in a breakable capsule which may be inserted by the patient or clinician into a device that punctures the capsule and blows the powder out in a steady stream suitable for inhalation. The compositions can include propellants, surfactants, and co-solvents and may be filled into conventional aerosol containers that are closed by a suitable metering valve.

[0199] Aerosols for the delivery to the respiratory tract are described, for example, by Adjei, A. and Garren, J. Pharm. Res., 1: 565-569 (1990); Zanen, P. and Lamm, J.-W. J. Int. J. Pharm., 114: 111-115 (1995); Gonda, I. “Aerosols for delivery of therapeutic and diagnostic agents to the respiratory tract,” in Critical Reviews in Therapeutic Drug Carrier Systems, 6:273-313 (1990); Anderson et al., Am. Rev. Respir. Dis., 140: 1317-1324 (1989)) and have potential for the systemic delivery of peptides and proteins as well (Patton and Platz, Advanced Drug Delivery Reviews, 8:179-196 (1992)); Timsina et. al., Int. J. Pharm., 101: 1-13 (1995); and Tansey, I. P., Spray Technol. Market, 4:26-29 (1994); French, D. L., Edwards, D. A. and Niven, R. W., Aerosol Sci., 27: 769-783 (1996); Visser, J., Powder Technology 58: 1-10 (1989)); Rudt, S. and R H. Muller, J. Controlled Release, 22: 263-272 (1992); Tabata, Y, and Y. Ikada, Biomed. Mater. Res., 22: 837-858 (1988); Wall, D. A., Drug Delivery, 2: 10 1-20 1995); Patton, J. and Platz, R., Adv. Drug Del. Rev., 8: 179-196 (1992); Bryon, P., Adv. Drug. Del. Rev., 5: 107-132 (1990); Patton, J. S., et al., Controlled Release, 28: 15 79-85 (1994); Damms, B. and Bains, W., Nature Biotechnology (1996); Niven, R. W., et al., Pharm. Res., 12(9); 1343-1349 (1995); and Kobayashi, S., et al., Pharm. Res., 13(1): 80-83 (1996), the contents of each of which are incorporated herein by reference in their entirety.

[0200] Microemulsification technology can improve bioavailability of some lipophilic (water insoluble) pharmaceutical agents. Examples include Trimetrine (Dordunoo, S. K., et al., Drug Development and Industrial Pharmacy, 17(12), 1685-1713, 1991 and REV 5901 (Sheen, P. C., et al., J Pharm Sci 80(7), 712-714, 1991). Among other things, microemulsification provides enhanced bioavailability by preferentially directing absorption to the lymphatic system instead of the circulatory system, which thereby bypasses the liver, and prevents destruction of the cell-based compositions in the hepatobiliary circulation.

[0201] The engineered EVs described herein can be formulated with an amphiphilic carrier. Amphiphilic carriers are saturated and monounsaturated polyethyleneglycolyzed fatty acid glycerides, such as those obtained from fully or partially hydrogenated various vegetable oils. Such oils may advantageously consist of tri-, di-, and mono-fatty acid glycerides and di- and mono-polyethyleneglycol esters of the corresponding fatty acids, with a particularly preferred fatty acid composition including capric acid 4-10, capric acid 3-9, lauric acid 40-50, myristic acid 14-24, palmitic acid 4-14 and stearic acid 5-15%. Another useful class of amphiphilic carriers includes partially esterified sorbitan and/or sorbitol, with saturated or mono-unsaturated fatty acids (SPAN-series) or corresponding ethoxylated analogs (TWEEN-series).

[0202] Commercially available amphiphilic carriers are particularly contemplated, including Gelucire-series, Labrafil, Labrasol, or Lauroglycol (all manufactured and distributed by Gattefosse Corporation, Saint Priest, France), PEG-mono-oleate, PEG-di-oleate, PEG-mono-laurate and di-laurate, Lecithin, Polysorbate 80, etc. (produced and distributed by a number of companies in USA and worldwide).

[0203] The engineered EV compositions provided herein can be formulated with hydrophilic polymers. Hydrophilic polymers are water-soluble, can be covalently attached to a vesicle-forming lipid, and which are tolerated in vivo without toxic effects (i.e., are biocompatible). Suitable polymers include polyethylene glycol (PEG), polylactic (also termed polylactide), polyglycolic acid (also termed polyglycolide), a polylactic-polyglycolic acid copolymer, and polyvinyl alcohol. Other hydrophilic polymers which may be suitable include polyvinylpyrrolidone, polymethoxazoline, polyethyloxazoline, polyhydroxypropyl methacrylamide, polymethacrylamide, polydimethylacrylamide, and derivatized celluloses such as hydroxymethylcellulose or hydroxyethylcellulose.

[0204] In certain embodiments, a pharmaceutical composition as described herein comprises a biocompatible polymer selected from the group consisting of polyamides, polycarbonates, polyalkylenes, polymers of acrylic and methacrylic esters, polyvinyl polymers, polyglycolides, polysiloxanes, polyurethanes and co-polymers thereof, celluloses, polypropylene, polyethylenes, polystyrene, polymers of lactic acid and glycolic acid, polyanhydrides, poly(ortho)esters, poly(butic acid), poly(valeric acid), poly(lactide-co-caprolactone), polysaccharides, proteins, polyhyaluronic acids, polycyanoacrylates, and blends, mixtures, or copolymers thereof.

[0205] In certain embodiments, a pharmaceutical composition described herein is formulated as a liposome. Liposomes can be prepared by any of a variety of techniques that are known in the art. See, e.g., U.S. Pat. No. 4,235,871; Published PCT applications WO 96/14057; New RRC, Liposomes: A practical approach, IRL Press, Oxford (1990), pages 33-104; Lasic D D, Liposomes from physics to applications, Elsevier Science Publishers BV, Amsterdam, 1993.

[0206] Therapeutic formulations of the engineered EV compositions as described herein can be prepared for storage by with optional pharmaceutically acceptable carriers, excipients or stabilizers (Remington's Pharmaceutical Sciences 16th edition, Osol, A. Ed. (1980)), in the form of lyophilized formulations or aqueous solutions. Acceptable carriers, excipients, or stabilizers are nontoxic to recipients at the dosages and concentrations employed, and include buffers such as phosphate, citrate, and other organic acids; antioxidants including ascorbic acid and methionine; preservatives (such as octadecyldimethylbenzyl ammonium chloride; hexamethonium chloride; benzalkonium chloride, benzethonium chloride; phenol, butyl or benzyl alcohol; alkyl parabens such as methyl or propyl paraben; catechol; resorcinol; cyclohexanol; 3-pentanol; and m-cresol); low molecular weight (less than about 10 residues) polypeptides; proteins, such as serum albumin, gelatin, or immunoglobulins; hydrophilic polymers such as polyvinylpyrrolidone; amino acids such as glycine, glutamine, asparagine, histidine, arginine, or lysine; monosaccharides, disaccharides, and other carbohydrates including glucose, mannose, or dextrins; chelating agents such as EDTA; sugars such as sucrose, mannitol, trehalose or sorbitol; salt-forming counter-ions such as sodium; metal complexes (e.g. Zn-protein complexes); and/or non-ionic surfactants such as TWEEN™, PLURONICS™ or polyethylene glycol (PEG).

[0207] Vaccine or other pharmaceutical compositions comprising an engineered EV composition as described herein can contain a pharmaceutically acceptable salt, typically, e.g., sodium chloride, and preferably at about physiological concentrations. The formulations of the vaccine or other pharmaceutical compositions described herein can contain a pharmaceutically acceptable preservative. In some embodiments, the preservative concentration ranges from 0.1 to 2.0%, typically v/v. Suitable preservatives include those known in the pharmaceutical arts. Benzyl alcohol, phenol, m-cresol, methylparaben, and propylparaben are examples of preservatives. The formulations of the vaccine or other pharmaceutical compositions described herein can include a pharmaceutically acceptable surfactant at a concentration of 0.005 to 0.02%.

[0208] Therapeutic pharmaceutical compositions described herein can also contain more than one active compound as necessary for the particular indication being treated, preferably those with complementary activities that do not adversely affect each other.

[0209] In some embodiments in which the engineered EVs are formulated for use in or with a vaccine, the vaccine composition can be formulated with the engineered EVs as an adjuvant. In other embodiments the vaccine composition can be formulated with the engineered EVs and an additional adjuvant, e.g., as known in the art.

[0210] As used herein in the context of immunization, immune response and vaccination, the term “adjuvant” refers to any substance than when used in combination with a specific antigen produces a more robust immune response than the antigen alone. When incorporated into a vaccine formulation, an adjuvant acts generally to accelerate, prolong, or enhance the quality of specific immune responses to the vaccine antigen(s). Adjuvants typically promote the accumulation and/or activation of accessory cells or factors to enhance antigen-specific immune responses and thereby enhance the efficacy of vaccines, i.e., antigen-containing or encoding compositions used to induce protective immunity against the antigen.

[0211] Adjuvants, in general, include adjuvants that create a depot effect, immune-stimulating adjuvants, and adjuvants that create a depot effect and stimulate the immune system. An adjuvant that creates a depot effect is an adjuvant that causes the antigen to be slowly released in the body, thus prolonging the exposure of immune cells to the antigen. This class of adjuvants includes but is not limited to alum (e.g., aluminum hydroxide, aluminum phosphate); emulsion-based formulations including mineral oil, non-mineral oil, water-in-oil or oil-in-water-in oil emulsion, oil-in-water emulsions such as Seppic ISA series of Montanide adjuvants (e.g., Montanide ISA 720; AirLiquide, Paris, France); MF-59 (a squalene-in-water emulsion stabilized with Span 85 and Tween 80; Chiron Corporation, Emeryville, Calif.); and PROVAX™ (an oil-in-water emulsion containing a stabilizing detergent and a micelle-forming agent; IDEC Pharmaceuticals Corporation, San Diego, Calif.).

[0212] An immune-stimulating adjuvant is an adjuvant that causes activation of a cell of the immune system. It may, for instance, cause an immune cell to produce and secrete cytokines and interferons. This class of adjuvants includes but is not limited to saponins purified from the bark of the Q. saponaria tree, such as QS21 (a glycolipid that elutes in the 21st peak with HPLC fractionation; Aquila Biopharmaceuticals, Inc., Worcester, Mass.); poly[di(carboxylatophenoxy)phosphazene (PCPP polymer; Virus Research Institute, USA); derivatives of lipopolysaccharides such as monophosphoryl lipid A (MPL; Ribi ImmunoChem Research, Inc., Hamilton, Mont.), muramyl dipeptide (MDP; Ribi) and threonyl-muramyl dipeptide (t-MDP; Ribi); OM-174 (a glucosamine disaccharide related to lipid A; OM Pharma S A, Meyrin, Switzerland); and Leishmania elongation factor (a purified Leishmania protein; Corixa Corporation, Seattle, Wash.). This class of adjuvants also includes CpG DNA.

[0213] Adjuvants that create a depot effect and stimulate the immune system are those compounds which have both of the above-identified functions. This class of adjuvants includes but is not limited to ISCOMS (immunostimulating complexes which contain mixed saponins, lipids and form virus-sized particles with pores that can hold antigen; CSL, Melbourne, Australia); SB-AS2 (SmithKline Beecham adjuvant system #2 which is an oil-in-water emulsion containing MPL and QS21: SmithKline Beecham Biologicals [SBB], Rixensart, Belgium); SB-AS4 (SmithKline Beecham adjuvant system #4 which contains alum and MPL; SBB, Belgium); non-ionic block copolymers that form micelles such as CRL 1005 (these contain a linear chain of hydrophobic polyoxypropylene flanked by chains of polyoxyethylene; Vaxcel, Inc., Norcross, Ga.); and Syntex Adjuvant Formulation (SAF, an oil-in-water emulsion containing Tween 80 and a nonionic block copolymer; Syntex Chemicals, Inc., Boulder, Colo.).

[0214] The active ingredients of the pharmaceutical compositions described herein can also be entrapped in microcapsules prepared, for example, by coacervation techniques or by interfacial polymerization, for example, hydroxymethylcellulose or gelatin-microcapsules and poly-(methylmethacylate) microcapsules, respectively, in colloidal drug delivery systems (for example, liposomes, albumin microspheres, microemulsions, nano-particles and nanocapsules) or in macroemulsions. Such techniques are disclosed in Remington's Pharmaceutical Sciences 16th edition, Osol, A. Ed. (1980).

[0215] In some embodiments, sustained-release preparations can be used. Suitable examples of sustained-release preparations include semipermeable matrices of solid hydrophobic polymers containing a composition described herein in which the matrices are in the form of shaped articles, e.g., films, or microcapsule. Examples of sustained-release matrices include polyesters, hydrogels (for example, poly(2-hydroxyethyl-methacrylate), or poly(vinylalcohol)), polylactides (U.S. Pat. No. 3,773,919), copolymers of L-glutamic acid and y ethyl-L-glutamate, non-degradable ethylene-vinyl acetate, degradable lactic acid-glycolic acid copolymers such as the LUPRON DEPOT™ (injectable microspheres composed of lactic acid-glycolic acid copolymer and leuprolide acetate), and poly-D-(−)-3-hydroxybutyric acid. While polymers such as ethylene-vinyl acetate and lactic acid-glycolic acid enable release of molecules for over 100 days, certain hydrogels release proteins for shorter time periods. When encapsulated, the composition can remain in the body for a long time (e.g., up to about 1 hour, between 1-12 hours, 12-24 hours, 24 hours to 2 days, 2-3 days, 3-4 days, 4-5 days, 5-6 days, 6-7 days, 1-2 weeks, 3-4 weeks, 4 weeks to 2 months, 2-3 months, 3-4 months, 4-5 months, 5-6 months, or more than 6 months, or a variation thereof), denature, or aggregate as a result of exposure to moisture at 37° C., resulting in a loss of biological activity and possible changes in immunogenicity. Rational strategies can be devised for stabilization depending on the mechanism involved. For example, if the aggregation mechanism is discovered to be intermolecular S—S-bond formation through thio-disulfide interchange, stabilization can be achieved by modifying sulfhydryl residues, lyophilizing from acidic solutions, controlling moisture content, using appropriate additives, and developing specific polymer matrix compositions.

### Administration, Dosing, Efficacy

[0216] The engineered EV compositions, pharmaceutical compositions, or vaccine compositions described herein can be formulated, dosed, and administered in a fashion consistent with good medical practice. Factors for consideration in this context include the particular disorder being treated, the particular subject being treated, the clinical condition of the individual subject, the cause of the disorder, the site of delivery of the vaccine composition, the method of administration, the scheduling of administration, and other factors known to medical practitioners.

[0217] Generally, application of artificial synapses as therapy will take into account similar parameters as other therapeutic strategies, including concentration, timing of delivery, and sustained bioavailability at injury/disease site. Extracellular vesicle can be delivered via a number of routes: intravenous, intracoronary, and intramyocardial. Extracellular vesicles (e.g., exosomes), also allow for new delivery routes that were previously infeasible for cell therapy, such as inhalation or injection. These various approaches are described below, including injection, topical application, enteral administration, and pulmonary delivery.

[0218] The engineered EV compositions provided herein can be administered to a subject in need thereof by any appropriate route which results in an effective treatment in the subject. As used herein, the terms “administering,” and “introducing” are used interchangeably and refer to the placement of a composition provided herein into a subject by a method or route which results in at least partial localization of such compositions at a desired site, such as a site of inflammation or a tumor, such that a desired effect(s) is produced. The compositions can be administered to a subject by any mode of administration that delivers the composition systemically or to a desired surface or target, and can include, but is not limited to, injection, infusion, instillation, and inhalation administration. To the extent that the composition can be protected from inactivation in the gut, oral administration forms are also contemplated. “Injection” includes, without limitation, intravenous, intramuscular, intra-arterial, intrathecal, intraventricular, intracapsular, intraorbital, retro-orbital, intravitreal, intraocular, intracardiac, intradermal, intraperitoneal, transtracheal, subcutaneous, subcuticular, intraarticular, sub capsular, subarachnoid, intraspinal, intracerebral, intratarsal, and intrasternal, intratumoral injection, and infusion or the like as known in the art.

[0219] A therapeutic does of the present invention may be delivered to a patient by means of controlled release, for example but not limited to, implantable pump and implantable cannulas to provide continuous access to the venous or arterial system.

[0220] Topical application refers to applying or spreading a composition of the present invention onto surfaces on or in the body, both internally and/or externally, in a therapeutically effective amount for local and/or systemic treatment. Topical application may be epicutaneuos wherein a composition of the present invention may be directly applied onto a localized surface of the skin or mucous membranes. Topical application may include transdermal application wherein a composition of the present invention may be absorbed into the body to obtain systemic delivery and systemic distribution. Topical application formulations may include, but are not limited to, creams, foams, gels, lotions, solutions, ointments, dermal patch, transdermal patches, powder, solid, sponge, tape, vapor, paste, film, liposomes, balm, shampoo, spray, or tincture or the like or a combination thereof. A therapeutic dose of a composition of the present invention may be delivered vaginally (for example a vaginal suppository, vaginal ring, douche, intrauterine device, intravesical infusion, and the like) or urethra or the like or a combination thereof.

[0221] Enteral administration refers to a composition of the present invention administered via the gastrointestinal tract in a therapeutically effective amount for local or systemic treatment. Enteral administration may include, but is not limited to, delivery of a composition of the present invention via the mouth, sublingual, esophagus, gastric (for example the stomach), small intestines, large intestines or rectum. Oral delivery of the present invention may include, but is not limited to, the use of a capsule, pastille, pill, tablet, solution, gel, suspension, emulsion, syrup, elixir, tincture, mouthwash, lozenges, chewing gum, lollipop, cream, foam, solution, powder, solid, vapor, liposomes, spray, or tincture osmotic-controlled release oral delivery system, or the like. Gastric delivery may involve the use of a tube or nasal passage that leads directly to the stomach, for example, a percutaneous endoscopic gastrostomy tube. Gastric delivery may involve direct injection made through the abdominal wall. Rectal delivery may involve, but is not limited to, the use of a suppository, ointment, enema, murphy drip, or the like. A therapeutic does of the present invention may be delivered to a patient by means of controlled release, for example but not limited to, controlled release drug delivery pellet or pill.

[0222] Inhalation (i.e., pulmonary delivery, pulmonary administration refers to delivery to the respiratory system through the respiratory route, including but not limited to, intranasal administration, oral administration, and oral inhalative administration (e.g. intratracheal instillation and intratracheal inhalation) of a therapeutically effective amount for local or systemic treatment. Pulmonary delivery of a therapeutically effective amount of a composition of the present invention may be achieved by dispersion, for example by using a syringe. Pulmonary delivery of a composition of the present invention may be achieved by aerosol administration, wherein aerosol administration may deposit a therapeutically effective amount of the present invention by gravitational sedimentation, inertial impaction, or diffusion.

[0223] Intravenous delivery technique can occur through a peripheral or central venous catheter. As the simplest delivery mode, this technique avoids the risk of an invasive procedure. However, intravenous may be regarded as a comparatively inefficient and less localized delivery method, as a high percentage of infused cell exosomes may become sequestered in organs such as the lung, liver, or spleen. Such sequestration may result in few or no cellular exosomes reaching broader circulation or have unintended systemic effects following their distribution.

[0224] In certain embodiments, administration can include delivery to a tissue or organ site that is the same as the site of diseased and/or dysfunctional tissue. In certain embodiments, administration can include delivery to a tissue or organ site that is different from the site or diseased and/or dysfunctional tissue. In certain embodiments, the delivery is via inhalation or oral administration. In various embodiments, administration of artificial synapses can include combinations of multiple delivery techniques.

[0225] In some embodiments, the compositions described herein are administered by aerosol administration, nebulizer administration, or tracheal lavage administration.

[0226] The term “effective amount” as used herein refers to the amount of an engineered EV composition needed to alleviate or prevent at least one or more symptom of a disease or disorder (e.g., autoimmune disease or cancer), and relates to a sufficient amount of pharmacological composition to provide the desired effect, e.g., reduce the pathology, or any symptom associated with or caused by the a disease. The term “therapeutically effective amount” therefore refers to an amount of an engineered EV composition or vaccine composition described herein using the methods as disclosed herein, that is sufficient to affect a particular disease state when administered to a typical subject. An effective amount as used herein would also include an amount sufficient to delay the development of a symptom of the disease, alter the course of a symptom disease (for example, but not limited to, slow the progression of a symptom of the disease), or reverse a symptom of the disease. Thus, it is not possible to specify the exact “effective amount.” However, for any given case, an appropriate “effective amount” can be determined by one of ordinary skill in the art using only routine experimentation.

[0227] Effective amounts, toxicity, and therapeutic efficacy can be determined by standard pharmaceutical procedures in cell cultures or experimental animals, e.g., for determining the LD50 (the dose lethal to 50% of the population) and the ED50 (the dose therapeutically effective in 50% of the population). The dosage can vary depending upon the dosage form employed and the route of administration utilized. The dose ratio between toxic and therapeutic effects is the therapeutic index and can be expressed as the ratio LD50/ED50. Compositions and methods that exhibit large therapeutic indices are preferred. A therapeutically effective dose can be estimated initially from cell culture assays. Also, a dose can be formulated in animal models to achieve a circulating plasma concentration range that includes the IC50 (i.e., the concentration of the engineered EVs or fusion polypeptides provided herein), which achieves a half-maximal inhibition of symptoms) as determined in cell culture, or in an appropriate animal model. Levels of therapeutic engineered EVs in plasma can be measured, for example, by high performance liquid chromatography, enzyme linked immunosorbent assay (ELISA), flow cytometry, FACS sorting, western blot, mass spectroscopy, tunable resistive pulse sensing, ExoView®, qRT-PCR, next generation sequencing (NGS), or by any analysis technique known by one of ordinary skill in the art. The effects of any particular dosage can be monitored by a suitable bioassay. The dosage can be determined by a physician and adjusted, as necessary, to suit observed effects of the treatment.

[0228] The engineered EV compositions, pharmaceutical compositions, or vaccine compositions described herein can be formulated, in some embodiments, with one or more additional therapeutic agents currently used to prevent or treat the infection, for example. The effective amount of such other agents depends on the amount of an engineered EV in the formulation, the type of disorder or treatment, and other factors discussed above. These are generally used in the same dosages and with administration routes as used herein before or about from 1 to 99% of the heretofore employed dosages.

[0229] The dosage ranges for the pharmaceutical compositions described herein depend upon the potency and encompass amounts large enough to produce the desired effect. The dosage should not be so large as to cause unacceptable adverse side effects. Generally, the dosage will vary with the age, condition, health, and sex of the patient and can be determined by one of skill in the art. The dosage can also be adjusted by the individual physician in the event of any complication. In some embodiments, the dosage ranges from 0.001 mg/kg body weight to 100 mg/kg body weight. In some embodiments, the dose range is from 5 μg/kg body weight to 100 μg/kg body weight. Alternatively, the dose range can be titrated to maintain serum levels between 0.1 μg/mL and 1000 μg/mL. For systemic administration, subjects can be administered a therapeutic amount, such as, e.g., 0.1 mg/kg, 0.5 mg/kg, 1.0 mg/kg, 2.0 mg/kg, 2.5 mg/kg, 5 mg/kg, 7.5 mg/kg, 10 mg/kg, 15 mg/kg, 20 mg/kg, 25 mg/kg, 30 mg/kg, 40 mg/kg, 50 mg/kg, or more. These doses can be administered by one or more separate administrations, or by continuous infusion. For repeated administrations over several days or longer, depending on the condition, the treatment is sustained until, for example, the infection is treated, as measured by the methods described above or known in the art. However, other dosage regimens can be useful.

[0230] In various embodiments, the quantities of artificial synapses that are administered to achieve these effects range from 1×10⁶ to 1×10⁷, 1×10⁷ to 1×10⁸, 1×10⁸ to 1×10⁹, 1×10⁹ to 1×10¹⁰, 1×10¹⁰ to 1×10¹¹, 1×10¹¹ to 1×10¹², 1×10¹² to 1×10¹³, 1×10¹³ to 1×10¹⁴, 1×10¹⁴ to 1×10¹⁵, 1×10¹⁵ or more EVs/artificial synapses. In other embodiments, the numbers of artificial synapses are relative to the number of cells used in a clinically relevant dose for a cell-therapy method. For example, defining an effective dose range, dosing regimen and route of administration, may be guided by studies using fluorescently labeled artificial synapses, and measuring target tissue retention, which can be >10×, >50×, or >100× background, as measured 5, 10, 15, 30, or 30 or more min as a screening criterion. In certain embodiments, >100× background measured at 30 mins is a baseline measurement for a low and high dose that is then assess for safety and bioactivity (e.g., using MRI endpoints: scar size, global and regional function of the target organ being treated). In various embodiments, single doses are compared to two, three, four, four or more sequentially-applied doses. In various embodiments, the repeated or sequentially-applied doses are provided for treatment of an acute disease and/or condition. In various embodiments, the repeated or sequentially-applied doses are provided for treatment of a chronic disease and/or condition. In other embodiments, administration of the plurality of artificial synapses is adjunctive to standard therapy.

[0231] In other embodiments, administering a composition includes 1×10¹⁰ or more artificial synapses in a single dose. In various embodiments, exosome quantity may be defined by protein quantity, such as dosages including 1-10, 10-25, 25-50, 50-75, 75-100, or 100 or more mg exosome protein. In other embodiments, a single dose is administered multiple times to the subject. In other embodiments, administering a composition consists of one or more of: injection, topical administration, enteral, intravenous, intra-arterial, or inhalation.

[0232] In various embodiments, exosome quantity may be defined by protein quantity, such as dosages including 1-10, 10-25, 25-50, 50-75, 75-100, or 100 or more mg exosome protein. In various embodiments, administering a composition includes multiple dosages of the artificial synapses. In various embodiments, the repeated or sequentially-applied doses are provided for treatment of an acute disease and/or condition. In various embodiments, the repeated or sequentially-applied doses are provided for treatment of a chronic disease and/or condition.

[0233] In other embodiments, administering a composition including a plurality of artificial synapses to the subject is adjunctive to standard therapy.

[0234] The duration of a therapy using the methods described herein will continue for as long as medically indicated or until a desired therapeutic effect (e.g., those described herein) is achieved. In certain embodiments, the administration of the vaccine composition described herein is continued for 1 month, 2 months, 4 months, 6 months, 8 months, 10 months, 1 year, 2 years, 3 years, 4 years, 5 years, 10 years, 20 years, or for a period of years up to the lifetime of the subject.

[0235] As will be appreciated by one of skill in the art, appropriate dosing regimens for a given composition can comprise a single administration/immunization or multiple ones. Subsequent doses may be given repeatedly at time periods, for example, about two weeks or greater up through the entirety of a subject's life, e.g., to provide a sustained preventative effect. Subsequent doses can be spaced, for example, about two weeks, about three weeks, about four weeks, about one month, about two months, about three months, about four months, about five months, about six months, about seven months, about eight months, about nine months, about ten months, about eleven months, or about one year after a primary immunization.

[0236] The precise dose to be employed in the formulation will also depend on the route of administration and should be decided according to the judgment of the practitioner and each patient's circumstances. Ultimately, the practitioner or physician will decide the amount of the engineered EV or composition thereof to administer to particular subjects.

### Methods of Modulating Inflammation and Treating Autoimmune Diseases

[0237] The artificial synapses/engineered EVs and compositions thereof provided herein can be deployed in a therapeutic strategy against virtually any injury/disease, as providing a platform for altering biological signaling. This includes, for example, inflammation and immune signaling, which plays a role in virtually all injuries and diseases in living organisms.

[0238] Thus, described herein is a method of modulating inflammation, including selecting a subject afflicted with an inflammatory related disease and/or condition; and administering to the subject a composition including a plurality of artificial synapses (engineered EVs) to the subject, wherein administration of the composition modulates inflammation.

[0239] As used herein, the term “inflammation” or “inflamed” refers to activation or recruitment of the immune system or immune cells (e.g. T cells, B cells, macrophages). A tissue that has inflammation can become reddened, white, swollen, hot, painful, sensitivity, exhibit a loss of function, or have a film or mucus. Methods of identifying inflammation are well known in the art. Inflammation typically occurs following injury, infection by a microorganism, exposure to a substance (e.g., a toxin, chemical, or dust) or autoimmune dysfunction. Onset of inflammation may be rapid (e.g., immediately following injury) or slow (e.g., repeated exposure to an irritant such as a chemical over time) with a duration of minutes, hours, days, months, years, or an individual's life.

[0240] Inflammation plays a vital role in alerting the immune system of potential danger and damage within a body. Inflammation is necessary to control and repair injury. For example, acute inflammation is a response to physical trauma, infection, and stress. Acute inflammation helps prevent further injury and triggers healing and recovery. Unfortunately, inflammation can become excessive and inappropriately active, lasting beyond the typical recovery time from an injury or infection. Wherein healthy inflammation helps a body respond to injury, chronic inflammation perpetuates injury and may lead to negative consequences to one's health. In particular, autoimmune diseases are chronic diseases from a host's immune system attacking itself, often due to aberrant biological signaling in the host. Restoring normal homeostatic signaling via application of artificial synapses, particularly targeting immune checkpoints, represents a highly promising avenue. For example, surface bound immune-checkpoint proteins or fragments thereof may modulate immune cell stimulation and affect suppression of immune cell function when delivered via artificial synapses. Injection, inhalation, ingestion or topical application of artificial synapses with surface bound immune-checkpoint proteins or fragments thereof may be used to treat immune, auto-immune, inflammatory, and auto-inflammatory conditions. Examples include chronic obstructive pulmonary disease (COPD) which is an inflammatory, progressive, life-threatening lung disease, psoriasis, a common chronic noncommunicable inflammatory skin disease, arthritis, a debilitating and painful degeneration of joints, among others well-understood to one of skill in the art.

[0241] In other embodiments, the inflammatory related disease and/or condition is acute, for example septicemia. In other embodiments, the inflammatory related disease and/or condition is chronic, for example chronic obstructive pulmonary disease. In other embodiments, the inflammatory condition is an autoimmune disease wherein the autoimmune disease and/or condition is one or more of: polymyositis, dermatomyositis, Graves' disease, Hashimoto's thyroiditis, myasthenia gravis, vasculitis, multiple sclerosis, psoriasis, rheumatoid arthritis, psoriatic arthritis, scleroderma, systemic lupus erythematosus, inflammatory bowel disease, Crohn's disease, hyperthyroidism, autoimmune adrenal insufficiency, Sjogren syndrome, type I diabetes mellitus, autoimmune hemolytic anemia, idiopathic thrombocytopenic purpura, myasthenia gravis, ulcerative colitis, uveitis, polyarteritis nodosa, relapsing polychondritis, Behcet's disease, reactive arthritis, ankylosing spondylitis, Guillain-Barre syndrome, or optic neuropathy. In other embodiments, the disease and/or condition is chronic obstructive pulmonary disease, rheumatoid arthritis, uveoretinitis, psoriasis, and eczema. In other embodiments, the disease and/or condition is irritable bowel disease, multiple sclerosis or lupus In other embodiments, the inflammatory related disease and/or condition is an ocular disease.

[0242] As used herein, the terms “ocular disease”, “eye disorder” and “eye disease” are used interchangeably and refer to a disease or disorder that affects the health and/or vision of either one or both eyes or the general area of the eye(s), eye lid(s), or area surrounding or in near proximity to the eye(s). Eye disease may include, but are not limited to, macular degeneration (e.g., age-related macular degeneration), cataracts, diabetic retinopathy, diabetic macular edema, eye floaters, eye flashes, glaucoma, amblyopia, strabismus, retinitis (e.g., CMV retinitis), color blindness, keratoconus, retinal detachment, eyelid twitching, ocular hypertension, blepharitis, uveitis, Bietti's crystalline dystrophy, blepharospasm, cornea and corneal diseases, dry eye, histoplasmosis, macular hole, macular pucker, conjunctivitis, presbyopia, retinoblastoma, retinitis pigmentosa, retinopathy, Stargardt disease, Usher syndrome, uveal Coloma, and vitreous detachment, or the like.

[0243] Described herein is a method for treatment including, selecting a subject in need of treatment, administering a composition including a plurality of artificial synapses to the individual, wherein administration of the composition treats the subject. In certain embodiments, the subject is in need to treatment for a disease and/or condition involving tissue damage or dysfunction.

[0244] Described herein is a method of treating an autoimmune disease, inflammation, inflammatory disease or condition, or cancer in a subject, the method comprising: administering to a subject the an engineered EV or composition thereof as provided herein to the subject.

[0245] Measured or measurable parameters include clinically detectable markers of disease, for example, elevated or depressed levels of a clinical or biological marker, as well as parameters related to a clinically accepted scale of symptoms or markers for a disease or disorder. It will be understood, however, that the total usage of the compositions and formulations as disclosed herein will be decided by the attending physician within the scope of sound medical judgment. The exact amount required will vary depending on factors such as the type of disease being treated.

[0246] Non-limiting examples of clinical tests that can be used to assess autoimmune diseases, inflammatory conditions, or inflammation parameters include blood tests, skin biopsy, MRI, eye examination, ocular pressure tests, etc. Where necessary or desired, animal models of injury or disease can be used to gauge the effectiveness of a particular composition as described herein. For example, an EAU animal model, as demonstrated in the working examples can be used.

[0247] In various embodiments, administration of the plurality of artificial synapses alters gene expression in the damaged or dysfunctional tissue, improves viability of the damaged tissue, and/or enhances regeneration or production of new tissue in the individual. In various embodiments, administration of the plurality of artificial synapses alters gene expression in the damaged or dysfunctional tissue, improves viability of the damaged tissue, and/or enhances regeneration or production of new tissue in the individual.

[0248] In various embodiments, the damaged or dysfunctional tissue is in need of repair, regeneration, or improved function due to an acute event. Acute events include, but are not limited to, trauma such as laceration, crush or impact injury, shock, loss of blood or oxygen flow, infection, chemical or heat exposure, poison or venom exposure, drug overuse or overexposure, and the like. Other sources of damage also include, but are not limited to, injury, age-related degeneration, cancer, and infection. In several embodiments, the regenerative cells used to prepare the engineered EVs provided herein are from the same tissue type as is in need of repair or regeneration. In several other embodiments, the regenerative cells are from a tissue type other than the tissue in need of repair or regeneration. In some embodiments, the engineered EVs provided herein are derived from the subject being treated. In some embodiments, the engineered EVs are derived from a donor subject.

[0249] In other embodiments, the damaged or dysfunctional tissue is in need of repair, regeneration, or improved function due to damage from chronic disease.

### Some Selected Definitions

[0250] All references cited herein are incorporated by reference in their entirety as though fully set forth. Unless defined otherwise, technical and scientific terms used herein have the same meaning as commonly understood by one of ordinary skill in the art to which this invention belongs. Allen et al., Remington: The Science and Practice of Pharmacy 22^{nd} ed., Pharmaceutical Press (Sep. 15, 2012); Hornyak et al., Introduction to Nanoscience and Nanotechnology, CRC Press (2008); Singleton and Sainsbury, Dictionary of Microbiology and Molecular Biology 3^{rd} ed., revised ed., J. Wiley & Sons (New York, N.Y. 2006); Smith, March's Advanced Organic Chemistry Reactions, Mechanisms and Structure 7^{th} ed., J. Wiley & Sons (New York, N.Y. 2013); Singleton, Dictionary of DNA and Genome Technology 3^{rd} ed., Wiley-Blackwell (Nov. 28, 2012); and Green and Sambrook, Molecular Cloning: A Laboratory Manual 4th ed., Cold Spring Harbor Laboratory Press (Cold Spring Harbor, N.Y. 2012), provide one skilled in the art with a general guide to many of the terms used in the present application. For references on the preparation and structure of antibodies and fusion polypeptides, see, e.g., Greenfield, Antibodies A Laboratory Manual 2^{nd} ed., Cold Spring Harbor Press (Cold Spring Harbor N.Y., 2013); Köhler and Milstein, Derivation of specific antibody-producing tissue culture and tumor lines by cell fusion, Eur. J. Immunol. 1976 July, 6(7):511-9; Queen and Selick, Humanized immunoglobulins, U.S. Pat. No. 5,585,089 (1996 December); and Riechmann et al., Reshaping human antibodies for therapy, Nature 1988 Mar. 24, 332(6162):323-7. See also, Kabat et al., Sequences of Proteins of Immunological Interest, 5th Ed. Public Health Service, National Institutes of Health, Bethesda, Md. (1991), Lanzavecchia et al., Eur. J. Immunol. 17, 105 (1987)), Huston et al., Proc. Natl. Acad. Sci. U.S.A., 85, 5879-5883 (1988), Bird et al., Science 242, 423-426 (1988), Brinkman et al. mAbs Vol 9, No. 2, 182-212 (2017), Chothia & Lesk, J. Mol. Biol, 196:901-917 (1987), Chothia et al., Nature 342:877-883 (1989)), Holliger et al. (1993) Proc. Natl. Acad. Sci. USA 90: 6444-6448; Poljak (1994) Structure 2: 1121-1123); Kontermann and Dubel eds., Antibody Engineering, Springer-Verlag, N.Y. (2001), p. 790 (ISBN 3-540-41354-5, Zapata et al. (1995) Protein Eng. 8(10): 1057-1062; Morrison, et al., Proc. Natl. Acad. Sci. USA, 81:6851 (1984), U.S. Pat. Nos. 4,816,567, 5,693,780, which are incorporated herein by reference in their entireties.

[0251] One skilled in the art will recognize many methods and materials similar or equivalent to those described herein, which could be used in the practice of the present invention. Indeed, the present invention is in no way limited to the methods and materials described. For purposes of the present invention, the following terms are defined below.

[0252] As used herein, the term “extracellular vesicle” and “vesicle” are used interchangeably and refer to a particle, wherein the particle comprises a phospholipid bilayer that encloses an internal space and an exterior surface and may or may not be derived from a cell. The size of extracellular vesicles can range between 20 nm to 3 μm in diameter but may be smaller than 20 nm or larger than 3 μm. Examples of extracellular vesicles include, but is not limited to, exosomes (for example small exosomes and large exosomes), ectosomes, macrovesicles, microparticles, apoptotic bodies, vesicular organelles, oncosomes (for examples large oncosomes), exospheres, exomeres, cell derived nanovesicles (CDN) (e.g., by genesis via grating or shearing cells), liposomes or the like known by one of ordinary skill in the art. Extracellular vesicles may originate naturally via known or unknown biosynthetic pathways. Extracellular vesicles may be promoted to originate by using mechanical methods such as cell grating or cell shearing wherein a cell is grated or sheared causing portions or parts of the cell membrane to from vesicles. For example, CDNs may be formed by using mechanical methods such as cell grating or cell shearing wherein a cell is grated or sheared causing portions or parts of the cell membrane to from vesicles. Additional non-limiting examples of mechanical methods that can be used to form cell derived nanovesicles are further described in detail, e.g., Goh, W. J., Zou, S., Ong, W. Y. el al. Bioinspired Cell-Derived Nanovesicles versus Exosomes as Drug Delivery Systems: a Cost-Effective Alternative. Sci Rep 7, 14322 (2017). https://doi.org/10.1038/s41598-017-14725-x, the contents of which are incorporated herein by reference in their entireties.

[0253] Extracellular vesicles comprise cargo, wherein the term “cargo” refers to peptides, proteins, nucleic acids, lipids, metabolites, carbohydrates, biomolecules, small molecules, large molecules, vesicles, organelles, or fragments thereof. In some embodiments, cargo may refer to existing drugs or therapeutics known in the art. Extracellular vesicle cargo may be located within the internal space of the extracellular vesicle. Extracellular vesicle cargo may be membrane bound and span one or both layers of the extracellular vesicle phospholipid bilayer (for example a transmembrane protein). Extracellular vesicle cargo may be in contact with the external or internal surface of the extracellular vesicle, for example through a covalent bond or a non-covalent bond. The phospholipid bilayer of the extracellular vesicle may comprise one or more transmembrane proteins, wherein a portion of the one or more transmembrane membrane proteins is located within the internal space of the extracellular vesicle. The phospholipid bilayer of the extracellular vesicle may comprise one or more transmembrane proteins, wherein the one or more transmembrane membrane proteins comprises a domain on the exterior of the extracellular vesicle. The phospholipid bilayer of the extracellular vesicle may comprise one or more transmembrane proteins, wherein the one or more transmembrane membrane proteins comprises a domain on the interior of the extracellular vesicle. Cargo may refer to a protein on the luminal side (e.g., in the internal space) of the extracellular vesicle wherein said protein encodes a vesicle targeting domain that may be in contact with the interior phospholipid layer of the extracellular vesicle. Cargo may refer to a protein on the luminal side (e.g., in the internal space) of the extracellular vesicle wherein said protein encodes a vesicle targeting domain that may be in contact with the interior phospholipid layer of the extracellular vesicle and wherein said protein may be presented into the internal space of the extracellular vesicle.

As used herein, the terms “sticky binder” and “vesicle targeting domain” and “anchor protein” are used interchangeably and refer to a protein that is covalently or non-covalently attached to at least one lipid wherein the one or more lipid is embedded within a membrane (e.g. a cell membrane), and the lipid serves to anchor the protein to the membrane. The terms “sticky binder” and “vesicle targeting domain” and “anchor protein” can also mean a protein sequence that encodes for one or more transmembrane domains wherein the one or more transmembrane domains spans at least partly through a phospholipid bilayer, for example the phospholipid bilayer of an extracellular vesicle. The transmembrane domain can be of a Type I or Type II membrane protein. Transmembrane domains can be structurally identified using methods known to those of skill in the art, such as sequence analysis programs that identify hydrophobic and hydrophilic domains (for example TMHMM Server, v. 2.0-DTU, Erik L. L. Sonnhammer, Gunnar von Heijne, and Anders Krogh: A hidden Markov model for predicting transmembrane helices in protein sequences. In Proc. of Sixth Int. Conf. on Intelligent Systems for Molecular Biology, p 175-182 Ed J. Glasgow, T. Littlejohn, F. Major, R. Lathrop, D. Sankoff, and C. Sensen Menlo Park, Calif.: AAAI Press, 1998, which is incorporated herein by reference in its entirety.)

[0254] A vesicle targeting domain may include, but is not limited to, one or more prenylation site, fatty acylation site, and/or glycosylphosphatidylinositol (GPI) linked protein. One preferred embodiment of a vesicle targeting domain is the GPI sequence from CD55. Another preferred embodiment of a vesicle targeting domain is the GPI sequence from CD59. Another embodiment of a vesicle targeting domain is the C1C2 domain from MFGE8. Other embodiments of sequences for vesicle targeting domains include transmembrane regions of CD9 (for example transmembrane 2 or 3 of CD9, CD9tm2 or CD9tm3, respectively), K-Ras (for example K-Ras4A and K-Ras4B), transmembrane domain from A Disintegrin and Metalloproteinase Domain-containing protein 10 (ADAM10, also known as CDw156 or CD156c) or other ADAM proteins. Vesicle targeting domains may include one or more sequences from 4F2 (for example 4F2 encoded by the solute carrier family 3 member 2 (SLC3A2) gene which makes up the heavy subunit of CD98). Vesicle targeting domains can include a sequence for one or more myristoylation sites. For example, the protein sequence for a myristoylation site from myristoylated alanine-rich C-kinase substrate (MARCKS) protein. Vesicle targeting domains can include a sequence for one or more palmitoylation sites. For example, the myristoylation sequence from the MARCKS protein may be modified to encode for a palmitoylation site. All variants, isoforms, or fragments or the like known by one of ordinary skill in the art are encompassed by the present invention.

[0255] Vesicle targeting domains may include transmembrane sequences from Homo sapiens transferrin receptor 2 (TFR2), transcript variant 1 (transferrin receptor protein 2 isoform 1) or versions therefore. In a preferred embodiment, the vesicle targeting domain may be a transmembrane domain from CD298.

[0256] As used herein, the terms “proteins” and “peptides” and “polypeptides” are used interchangeably herein to designate a series of amino acid residues connected to the other by peptide bonds between the alpha-amino and carboxy groups of adjacent residues. Although “protein” is often used in reference to relatively large polypeptides, and “peptide” is often used in reference to small polypeptides, usage of these terms in the art overlaps and varies. The term “peptide” as used herein refers to peptides, polypeptides, proteins and fragments of proteins, unless otherwise noted. The terms “protein” and “peptide” are used interchangeably herein when referring to a gene product and fragments thereof. Thus, exemplary peptides or proteins include gene products, naturally occurring proteins, homologs, orthologs, paralogs, fragments and other equivalents, variants, fragments, and analogs of the foregoing.

[0257] “As used herein, the term “linker” refers to a synthetic protein sequence of amino acids that is used to connect two polypeptide domains via peptide bonds.

[0258] As used herein, the term “fusion protein” refers to a single chimeric protein comprising a protein of interest (e.g. checkpoint protein) joined to an exogenous protein or protein fragment (e.g. an anchor protein), wherein the components of the fusion protein are linked to each other by peptide-bonds, either directly or through a peptide linker. The anchor protein of the fusion protein may enhance incorporation of the fusion protein onto and/or into the membrane of a vesicle, for example the internal and/or external leaflet of the phospholipid bilayer of an exosome membrane. The fusion protein may have at least a part of an amino acid sequence of an immune checkpoint protein or proteins involved in immune synapses. The fusion protein may have at least a part of an amino acid sequence of A2AR, VTCN1, Galectin 9, FGL-1, PECAM-1, TSG-6, STAB-1, NRP1, NRP2, SEMA3A, SEMA3F, RGMB, TIM-3, TIGIT, HLA class I, HLA class II, VISTA, HMGB1, phosphatidylserine, T-cell receptor (TCR), SHP-1, SHP-2, FBXO38, SH2D1A, B7RP1, IDO, NOX2, TNFRSF18, B7-H4, B7-H5, SISP1, B7-H6, B7-H7, APLNR, IFN γ, PD-1, WNT5A, IL-6, IL-10, NKG2 family of C-type lectin receptors, ligands of NKG2 family, killer cell immunoglobulin-like receptors, CD2, CD4, CD8, CD27, CD27 ligand (CD70), CD28, CD28H, CD39, CD40, CD44, CD47, CD63, CD66a, CD80, B7-2, CD86, CD73, CD94, CD96, CD101, CD112, CD112R, CD122, CD134, CD137 (4-1BB), CD137 ligand (4-1BBL), CD152, CD154, CD155, CD158, CD158a, CD158g, CD158h, KIR2DL1, KIR2DS1, KIRDS3, KIR2DS5, CD160, CD172a, CD200, CD200R, CD223, CD226, CD252, CD270, CD272, CD273, CD274, CD275, CD276, CD278, CD279 (PD-1), CD279 ligand (PD-L1/PDL-2), CD328, CD329, and/or CD337. The fusion protein may have a polypeptide linker sequence (e.g., an Fc domain and/or a GSSG linker), followed by an amino acid sequence coding for an anchor protein sequence (e.g., a prenylation site, fatty acylation site, or a GPI sequence) or any isoform, fragment, variation thereof, or a ligand to the aforementioned proteins thereof, or the like known by one of ordinary skill in the art. All variants are encompassed by the present invention.

[0259] As used herein, the term “immune synapse” and “cell synapse” are used interchangeably and refer to cell-to-cell interaction wherein said interaction results in activation, suppression, and/or adhesion of either one or more cells. Immune synapse or cell synapse are mediated by proteins that may be cytoplasmic, membrane bound, membrane associated, and/or secreted. Immune or cell synapses may be mediated by one or more “immune checkpoint proteins” which herein refers to any protein that is involved in maintaining immune homeostasis or plays a role in regulating immune activation or suppression. Immune checkpoint proteins may be cytoplasmic, membrane bound, membrane associated, and/or secreted.

[0260] As used herein, the term “fragment” or “active fragment” refers to a portion of a nucleic acid or polypeptide provided herein that retains the ability to be expressed by the engineered EVs provided herein. In some embodiments, the active fragment retains the ability to activate a target polypeptide, thereby increasing the activity of said target polypeptide (e.g., suppressing an immune response).

[0261] As used herein, the terms “specifically bind” and/or “specifically recognize” or “substantially binds” refers to the affinity of a binding molecule for a target molecule compared to the binding molecule's affinity for non-target molecules. A binding molecule (e.g., a POI domain) that specifically binds a target molecule (e.g., a target polypeptide provided herein) does not substantially recognize or bind non-target molecules. e.g., an antibody “specifically binds” and/or “specifically recognize” another molecule, meaning that this interaction is dependent on the presence of the binding specificity of the molecule structure, e.g., an antigenic epitope. As used herein, “non-specific binding” and “background binding” refers to the interaction that does not depend on the presence of specific structure (e.g., a specific antigenic epitopes). Methods of measuring binding of a polypeptide to a target are known in the art (e.g., differential scanning calorimetry, isothermal titration calorimetry, spectroscopy, crystallography, surface plasmon resonance, co-immunoprecipitation, pulldown assays, crosslinking, yeast two-hybrid system, tandem affinity purification-mass spectroscopy, protein microarrays, bio-layer interferometry, far-Western blots, computational prediction, analytical ultracentrifugation, light scattering, fluorescence spectroscopy, resonance energy transfer, ELISA or ELISPOT assays, or any other assays known in the art).

[0262] As used herein, the terms “treat,” “treatment,” “treating,” or “amelioration” refer to therapeutic treatments, wherein the object is to reverse, alleviate, ameliorate, inhibit, slow down or stop the progression or severity of a condition associated with, a disease or disorder. The term “treating” includes reducing or alleviating at least one adverse effect or symptom of a condition, disease or disorder associated with an infection or a cancer. Treatment is generally “effective” if one or more symptoms or clinical markers are reduced. Alternatively, treatment is “effective” if the progression of a disease is reduced or halted. That is, “treatment” includes not just the improvement of symptoms or markers, but also a cessation or at least slowing of progress or worsening of symptoms that would be expected in absence of treatment. Beneficial or desired clinical results include, but are not limited to, alleviation of one or more symptom(s), diminishment of extent of disease, stabilized (i.e., not worsening) state of disease, delay or slowing of disease progression, amelioration or palliation of the disease state, and remission (whether partial or total), whether detectable or undetectable. The term “treatment” of a disease also includes providing relief from the symptoms or side-effects of the disease (including palliative treatment).

[0263] As used herein “preventing” or “prevention” refers to any methodology where the disease state does not occur due to the actions of the methodology (such as, for example, administration of a composition or construct as described herein). In one aspect, it is understood that prevention can also mean that the disease is not established to the extent that occurs in untreated controls. Accordingly, prevention of a disease encompasses a reduction in the likelihood that a subject can develop the disease, relative to an untreated subject (e.g., a subject who is not treated with the methods or compositions described herein).

[0264] As used herein, the terms “autoimmune condition” and “autoimmune disease” are used interchangeably and refer to any disease characterized by abnormal functioning of the immune system and may include, but is not limited to, achalasia, Addison's disease, adult Still's disease, agammaglobulinemia, alopecia areata, amyloidosis, ankylosing spondylitis, anti-GBM/Anti-TBM nephritis, antiphospholipid syndrome, autoimmune angioedema, autoimmune dysautonomia, autoimmune encephalomyelitis, autoimmune hepatitis, autoimmune inner ear disease (AIED), autoimmune myocarditis, autoimmune oophoritis, autoimmune orchitis, autoimmune pancreatitis, autoimmune retinopathy, autoimmune urticaria, axonal & neuronal neuropathy (AMAN), Baló disease, Behcet's disease, benign mucosal pemphigoid, bullous pemphigoid, Castleman disease, celiac disease, Chagas disease, chronic inflammatory demyelinating polyneuropathy (CIDP), chronic recurrent multifocal osteomyelitis (CRMO), Churg-Strauss syndrome (CSS), eosinophilic granulomatosis (EGPA), cicatricial pemphigoid, Cogan's syndrome, cold agglutinin disease, congenital heart block, coxsackie myocarditis, CREST syndrome, Crohn's disease, dermatitis herpetiformis, dermatomyositis, Devic's disease (neuromyelitis optica), discoid lupus, Dressler's syndrome, endometriosis, eosinophilic esophagitis (EoE), eosinophilic fasciitis, erythema nodosum, essential mixed cryoglobulinemia, Evans syndrome, fibromyalgia, fibrosing alveolitis, giant cell arteritis (temporal arteritis), giant cell myocarditis, glomerulonephritis, Goodpasture's syndrome, granulomatosis with polyangiitis, Graves' disease, Guillain-Barre syndrome, Hashimoto's thyroiditis, hemolytic anemia, Henoch-Schonlein purpura (HSP), Herpes gestationis or pemphigoid gestationis (PG), hidradenitis suppurativa (HS) (acne inversa), hypogammalglobulinemia, IgA nephropathy, IgG4-related sclerosing disease, immune thrombocytopenic purpura (ITP), inclusion body myositis (IBM), interstitial cystitis (IC), juvenile arthritis, type 1 diabetes, juvenile myositis (JM), Kawasaki disease, Lambert-Eaton syndrome, leukocytoclastic vasculitis, lichen planus, lichen sclerosus, ligneous conjunctivitis, linear IgA disease (LAD), lupus, lyme disease chronic, Meniere's disease, microscopic polyangiitis (MPA), mixed connective tissue disease (MCTD), Mooren's ulcer, Mucha-Habermann disease, multifocal motor neuropathy (MMN) or MMNCB, multiple sclerosis, myasthenia gravis, myositis, narcolepsy, neonatal Lupus, neuromyelitis optica, neutropenia, ocular cicatricial pemphigoid, optic neuritis, palindromic rheumatism (PR), PANDA, paraneoplastic cerebellar degeneration (PCD), paroxysmal nocturnal hemoglobinuria (PNH), Parry Romberg syndrome, pars planitis (peripheral uveitis), Parsonage-Turner syndrome, pemphigus, peripheral neuropathy, perivenous encephalomyelitis, pernicious anemia (PA), POEMS syndrome, polyarteritis nodosa, polyglandular syndromes type I, II, II, polymyalgia rheumatica, polymyositis, postmyocardial infarction syndrome, postpericardiotomy syndrome, primary biliary cirrhosis, primary sclerosing cholangitis, progesterone dermatitis, psoriasis, psoriatic arthritis, pure red cell aplasia (PRCA), pyoderma gangrenosum, Raynaud's phenomenon, reactive arthritis, reflex sympathetic dystrophy, relapsing polychondritis, restless legs syndrome (RLS), retroperitoneal fibrosis, rheumatic fever, rheumatoid arthritis, sarcoidosis, Schmidt syndrome, scleritis, scleroderma, Sjögren's syndrome, sperm & testicular autoimmunity, stiff person syndrome (SPS), subacute bacterial endocarditis (SBE), Susac's syndrome, sympathetic ophthalmia (SO), takayasu's arteritis, temporal arteritis/Giant cell arteritis, thrombocytopenic purpura (TTP), Tolosa-Hunt syndrome (THS), transverse myelitis, type 1 diabetes, ulcerative colitis (UC), undifferentiated connective tissue disease (UCTD), uveitis, vasculitis, vitiligo, Vogt-Koyanagi-Harada disease. An autoimmune condition or autoimmune diseases may be caused by, but not limited to, a natural predisposition, a infection (e.g., bacteria or virus), drugs, vaccination, environmental triggers (e.g., toxins or chemicals such as dust, silica, oil, benzene, tri- or per-chloroethylene etc.), stress, cancer, blood or tissue or organ transplantation, or unknown etiology. Autoimmune disorders may result in but not limited to the destruction of body tissue, abnormal growth of an organ or tissue, changes in organ or tissue function (e.g., changes in blood vessels, connective tissue, function of endocrine glands, joints, muscles, blood cells, skin, etc.).

[0265] As used herein, the term “cancer” refers to a hyperproliferation of cells that exhibit a loss of normal cellular control that results in unregulated growth, lack of differentiation, local tissue invasion, and metastasis. The methods and compositions described herein can be used for the treatment of solid tumors (e.g., cancer) or non-solid tumors, such as leukemia, blood cell cancers, and the like. Solid tumors can be found in bones, muscles, the brain, or organs, and can be sarcomas or carcinomas. Where the methods and compositions described herein can overcome barriers of tumor treatment, including, but not limited to barriers to treatment or inhibition of metastases, it is contemplated that aspects of the technology described herein can be used to treat all types of solid and non-solid tumor cancers, including cancers not listed in the instant specification. The compositions and methods described herein, without limitation, include methods of treating cancer, methods of inhibiting metastases, and methods of inducing an anti-tumor immune response.

[0266] As used herein, the terms “subject”, “individual”, “host”, and “patient” are used interchangeably and may refer to any animal, mammal, bird, fish, reptile, and amphibian, for example, human, monkey, dog, cat, horse, pig, cattle, ox, donkey, rabbit, sheep, goat, mouse, rat, guinea pig, llama, chicken, goose, duck, turkey, or the like receiving or registered to receive a therapeutic amount of a composition of the present invention for medical care or treatment.

[0267] As used herein, the term “injection” refers to any process or method which allows the person skilled in the art to administer any therapeutic to a target site by penetration. Examples of injection are, but not limited to, subcutaneous, subcuticular, subcapsular, subarachnoid, intradermal, intramuscular, intravenous, intra-arterial, intraventricular, intracapsular, intraorbital, intraocular, intrathoracic, intraperitoneal, intravitreal, retro-orbital, intranasal, intracerebral, intrathymic, intraspinal, intrasternal, intra-articular, intracavernous, intracardiac, intraosseous, intrathecal, transtracheal, epidural, or the like as known in the art. A therapeutic does of the present invention may be delivered to a patient by means of controlled release, for example but not limited to, implantable pump and implantable cannulas to provide continuous access to the venous or arterial system.

[0268] As used herein, the term “topical application” refers to applying or spreading a composition of the present invention onto surfaces on or in the body, both internally and/or externally, in a therapeutically effective amount for local and/or systemic treatment. Topical application may be epicutaneuos wherein a composition of the present invention may be directly applied onto a localized surface of the skin or mucous membranes. Topical application may include transdermal application wherein a composition of the present invention may be absorbed into the body to obtain systemic delivery and systemic distribution. For example, a transdermal patch may be applied onto the body to deliver a therapeutic dose of a composition of the invention presented herein. Topical application formulations may include, but are not limited to, creams, foams, gels, lotions, solutions, ointments, dermal patch, transdermal patches, powder, solid, sponge, tape, vapor, paste, film, liposomes, balm, shampoo, spray, or tincture. A therapeutic dose of a composition of the present invention may be delivered vaginally (for example a vaginal suppository, vaginal ring, douche, intrauterine device, intravesical infusion, and the like) or urethra.

[0269] As used herein, the term “enteral administration” refers to a composition of the present invention administered via the gastrointestinal tract in a therapeutically effective amount for local or systemic treatment. Enteral administration may include, but is not limited to, delivery of a composition of the present invention via the mouth, sublingual, esophagus, gastric (for example the stomach), small intestines, large intestines or rectum. Oral delivery of the present invention may include, but is not limited to, the use of a capsule, pastille, pill, tablet, solution, gel, suspension, emulsion, syrup, elixir, tincture, mouthwash, lozenges, chewing gum, lollipop, osmotic-controlled release oral delivery system, or the like. Gastric delivery may involve the use of a tube or nasal passage that leads directly to the stomach, for example, a percutaneous endoscopic gastrostomy tube. Gastric delivery may involve direct injection made through the abdominal wall. Rectal delivery may involve, but is not limited to, the use of a suppository, ointment, enema, murphy drip, or the like. A therapeutic does of the present invention may be delivered to a patient by means of controlled release, for example but not limited to, controlled release drug delivery pellet or pill.

[0270] As used herein, the terms “pulmonary system” or “respiratory system” are used interchangeably and refer, but are not limited, to the respiratory region, conducting airways, nasal cavity, sinuses, nasopharynx, oropharynx, larynx, trachea, bronchi, bronchioles, respiratory bronchioles, alveolar ducts, alveolar sacs, respiratory epithelium (e.g., alveolar epithelial cells), endothelial cells, or the like.

[0271] As used herein, the terms “pulmonary delivery” and “pulmonary administration” are used interchangeably and refer to delivering a composition of the present invention to the respiratory system through the respiratory route, including but not limited to, intranasal administration, oral administration, and oral inhalative administration (e.g., intratracheal instillation and intratracheal inhalation) of a therapeutically effective amount for local or systemic treatment. Pulmonary delivery of a therapeutically effective amount of a composition of the present invention may be achieved by dispersion, for example by using a syringe. Pulmonary delivery of a composition of the present invention may be achieved by aerosol administration, wherein aerosol administration may deposit a therapeutically effective amount of the present invention by gravitational sedimentation, inertial impaction, or diffusion.

[0272] Pulmonary delivery of a therapeutically effective amount of a composition of the present invention may be deposited on any mucus layer of the respiratory system, for example, but not limited to, the mucus layer which coats the walls of conducting airways, the smaller airway, and/or alveolar space.

[0273] As used herein, an “appropriate control” refers to an untreated, otherwise identical cell or population (e.g., a subject who was not administered the composition described herein, or was administered by only a subset of agents provided herein, as compared to a non-control cell).

[0274] As used herein, a “reference level” can refer to one or more parameters or markers as measured for a normal, otherwise unaffected cell population or tissue (e.g., a biological sample obtained from a healthy subject, or a biological sample obtained from the subject at a prior time point, or a biological sample that has not yet been contacted with a pathogen as described herein). For measuring or monitoring therapeutic efficacy, a level determined prior to treatment or earlier in treatment can also provide a reference level for a given parameter or value.

[0275] As used herein, the term “modulates” refers to an effect including increasing or decreasing a given parameter as those terms are defined herein.

[0276] The terms “increased,” “increase,” “increases,” or “enhance” or “activate” are all used herein to generally mean an increase of a property, level, or other parameter by a statistically significant amount; for the avoidance of any doubt, the terms “increased”, “increase” or “enhance” or “activate” means an increase of at least 10% as compared to a reference level, for example an increase of at least about 20%, or at least about 30%, or at least about 40%, or at least about 50%, or at least about 60%, or at least about 70%, or at least about 80%, or at least about 90% or up to and including a 100% increase or any increase between 10-100% as compared to a reference level, or at least about a 2-fold, or at least about a 3-fold, or at least about a 4-fold, or at least about a 5-fold or at least about a 10-fold increase, at least about a 20-fold increase, at least about a 50-fold increase, at least about a 100-fold increase, at least about a 1000-fold increase or more as compared to a reference level. For example, increasing activity can refer to activating a receptor or a signaling pathway (e.g., antibody production or inflammation).

[0277] The terms “decrease”, “reduced”, “reduction”, or “inhibit” are all used herein to mean a decrease or lessening of a property, level, or other parameter by a statistically significant amount. In some embodiments of any of the aspects, “reduce,” “reduction” or “decrease” or “inhibit” typically means a decrease by at least 10% as compared to a reference level (e.g., the absence of a given treatment) and can include, for example, a decrease by at least about 10%, at least about 20%, at least about 25%, at least about 30%, at least about 35%, at least about 40%, at least about 45%, at least about 50%, at least about 55%, at least about 60%, at least about 65%, at least about 70%, at least about 75%, at least about 80%, at least about 85%, at least about 90%, at least about 95%, at least about 98%, at least about 99%, or more. As used herein, “reduction” or “inhibition” does not encompass a complete inhibition or reduction as compared to a reference level. “Complete inhibition” is a 100% inhibition as compared to a reference level. A decrease can be preferably down to a level accepted as within the range of normal for an individual without a given disorder.

[0278] As used herein the term “comprising” or “comprises” is used in reference to compositions, methods, and respective component(s) thereof, that are essential to the method or composition, yet open to the inclusion of unspecified elements, whether essential or not.

[0279] As used herein the term “consisting essentially of” refers to those elements required for a given embodiment. The term permits the presence of elements that do not materially affect the basic and novel or functional characteristic(s) of that embodiment.

[0280] The term “consisting of” refers to compositions, methods, and respective components thereof as described herein, which are exclusive of any element not recited in that description of the embodiment.

[0281] As used in this specification and the appended claims, the singular forms “a,” “an,” and “the” include plural references unless the context clearly dictates otherwise. Thus for example, references to “the method” includes one or more methods, and/or steps of the type described herein and/or which will become apparent to those persons skilled in the art upon reading this disclosure and so forth. Similarly, the word “or” is intended to include “and” unless the context clearly indicates otherwise. Although methods and materials similar or equivalent to those described herein can be used in the practice or testing of this disclosure, suitable methods and materials are described below. The abbreviation, “e.g.” is derived from the Latin exempli gratia, and is used herein to indicate a non-limiting example. Thus, the abbreviation “e.g.” is synonymous with the term “for example.”

[0282] The abbreviation, “etc.” is derived from the Latin et cetera, and is used herein to indicate a non-limiting list. Thus, the abbreviation “etc.” is synonymous with the term “and other similar things”, or “and so forth”.

[0283] Other than in the operating examples, or where otherwise indicated, all numbers expressing quantities of ingredients or reaction conditions used herein should be understood as modified in all instances by the term “about.” The term “about” when used in connection with percentages can mean ±1%.

[0284] The term “statistically significant” or “significantly” refers to statistical significance and generally means a two-standard deviation (2SD) difference, above or below a reference value. Additional definitions are provided in the text of individual sections below.

[0285] It should be understood that this invention is not limited to the particular methodology, protocols, and reagents, etc., described herein and as such may vary. The terminology used herein is for the purpose of describing particular embodiments only, and is not intended to limit the scope of the present invention, which is defined solely by the claims.

[0286] As used herein and in the claims, the singular forms include the plural reference and vice versa unless the context clearly indicates otherwise. The term “or” is inclusive unless modified, for example, by “either.” Other than in the operating examples, or where otherwise indicated, all numbers expressing quantities of ingredients or reaction conditions used herein should be understood as modified in all instances by the term “about.”

[0287] Unless otherwise explained, all technical and scientific terms used herein have the same meaning as commonly understood by one of ordinary skill in the art to which this disclosure belongs.

[0288] It is to be understood that the foregoing description and the following examples are illustrative only and are not to be taken as limitations upon the scope of the invention. Various changes and modifications to the disclosed embodiments, which will be apparent to those of skill in the art, may be made without departing from the spirit and scope of the present invention. Further, all patents, patent applications, and publications identified are expressly incorporated herein by reference for the purpose of describing and disclosing, for example, the methodologies described in such publications that might be used in connection with the present invention. These publications are provided solely for their disclosure prior to the filing date of the present application. Nothing in this regard should be construed as an admission that the inventors are not entitled to antedate such disclosure by virtue of prior invention or for any other reason. All statements as to the date or representation as to the contents of these documents are based on the information available to the applicants and do not constitute any admission as to the correctness of the dates or contents of these documents.

[0289] All patents and other publications identified are expressly incorporated herein by reference for the purpose of describing and disclosing, for example, the methodologies described in such publications that could be used in connection with the present invention. These publications are provided solely for their disclosure prior to the filing date of the present application. Nothing in this regard should be construed as an admission that the inventors are not entitled to antedate such disclosure by virtue of prior invention or for any other reason. All statements as to the date or representation as to the contents of these documents is based on the information available to the applicants and does not constitute any admission as to the correctness of the dates or contents of these documents.

[0290] Some embodiments of the technology described herein can be defined according to any of the following numbered paragraphs:
[0291] 1. An engineered extracellular vesicle comprising:
   [0292] at least one fusion polypeptide comprising:
      [0293] (i) at least one protein of interest (POI) domain or a fragment thereof; and
      [0294] (ii) at least one vesicle targeting domain,
   [0295] wherein the POI domain is in an extracellular position relative to a lipid membrane of the extracellular vesicle.
[0296] 2. The engineered extracellular vesicle of paragraph 1, wherein the extracellular vesicle is an exosome.
[0297] 3. The engineered extracellular vesicle of paragraph 1 or paragraph 2, wherein the protein of interest (POI) domain or a fragment thereof is a N-terminal domain of the fusion polypeptide.
[0298] 4. The engineered extracellular vesicle of any one of paragraphs 1-3, wherein the vesicle targeting domain is a C-terminal domain of the fusion polypeptide.
[0299] 5. The engineered extracellular vesicle of any one of paragraphs 1-4, wherein the fusion polypeptide comprises at least two POI domains and/or at least two exosome targeting domains.
[0300] 6. The engineered extracellular vesicle of any one of paragraphs 1-5, wherein the fusion polypeptide further comprises a peptide linker.
[0301] 7. The engineered extracellular vesicle of any one of paragraphs 1-6, wherein the fusion polypeptide further comprises a fragment crystallizable region (Fc) domain.
[0302] 8. The engineered extracellular vesicle of any one of paragraphs 1-7, wherein the vesicle targeting domain is in a luminal position relative to the lipid membrane of the extracellular vesicle.
[0303] 9. The engineered extracellular vesicle of any one of paragraphs 1-7, wherein the vesicle targeting domain in an exterior position relative to the lipid membrane of the extracellular vesicle.
[0304] 10. The engineered extracellular vesicle of any one of paragraphs 1-9, wherein the POI domain is selected from the group consisting of: Table 1.
[0305] 11. The engineered extracellular vesicle of any one of paragraphs 1-10, wherein the POI domain is PD-L1 or a fragment thereof.
[0306] 12. The engineered extracellular vesicle of any one of paragraphs 1-11, wherein the POI domain is PD-L2 or a fragment thereof.
[0307] 13. The engineered extracellular vesicle of any one of paragraphs 1-12, wherein the POI domain is FGL1 or a fragment thereof.
[0308] 14. The engineered extracellular vesicle of any one of paragraphs 1-13, wherein the POI domain is 4-1BBL or a fragment thereof.
[0309] 15. The engineered extracellular vesicle of any one of paragraphs 1-14, wherein the POI domain is CTLA-4 or a fragment thereof.
[0310] 16. The engineered extracellular vesicle of any one of paragraphs 1-15, wherein the POI domain substantially binds to one or more of a target polypeptide.
[0311] 17. The engineered extracellular vesicle of paragraph 16, wherein the target polypeptide is selected from the group consisting of: Table 2.
[0312] 18. The engineered extracellular vesicle of any one of paragraphs 1-17, wherein the vesicle targeting domain is selected from the group consisting of: Table 3.
[0313] 19. The engineered extracellular vesicle of any one of paragraphs 1-18, wherein the linker is in an exterior position relative to the lipid membrane of the extracellular vesicle.
[0314] 20. The engineered extracellular vesicle of any one of paragraphs 1-18, wherein the linker is a transmembrane linker.
[0315] 21. The engineered extracellular vesicle of any one of paragraphs 1-18, wherein the linker is in a luminal position relative to the lipid membrane of the extracellular vesicle.
[0316] 22. The engineered extracellular vesicle of any one of paragraphs 1-21, wherein the extracellular vesicle does not comprise an endogenous POI polypeptide.
[0317] 23. A composition comprising a plurality of the engineered extracellular vesicles of any one of paragraphs 1-22.
[0318] 24. The composition of paragraph 23, further comprising a pharmaceutically acceptable carrier.
[0319] 25. An engineered extracellular vesicle comprising:
   [0320] (a) a first fusion polypeptide comprising:
      [0321] (i) at least one protein of interest (POI) domain or a fragment thereof; and
      [0322] (ii) at least one vesicle targeting domain,
   [0323] wherein the at least one POI domain is in an extracellular position relative to a lipid membrane of the extracellular vesicle,
   [0324] (b) a second fusion polypeptide comprising:
      [0325] (i) at least one protein of interest (POI) domain or a fragment thereof; and
      [0326] (ii) at least one vesicle targeting domain,
   [0327] wherein the POI domain is in an extracellular position relative to a lipid membrane of the extracellular vesicle,
   [0328] and wherein the at least one vesicle targeting domain is within a lipid membrane of the extracellular vesicle.
[0329] 26. A composition comprising two or more of the engineered extracellular vesicles selected from any one of paragraphs 1-25.
[0330] 27. An extracellular vesicle composition comprising:
   [0331] a plurality of artificial synapses,
   [0332] wherein each artificial synapse comprises (i) an extracellular vesicle; (ii) one or more sticky binders; and (iii) one or more signaling domains.
   [0333] The composition of paragraph 27, wherein the extracellular vesicle comprises an exosome.
[0334] 28. The composition of paragraph 27, wherein the one or more sticky binders is selected from the group consisting of: a GPI anchor, a fatty acetylation site, and a prenylation site.
[0335] 30. The composition of paragraph 27, wherein the signaling domain comprises one or more of: PD-L1, PD-L2, CTLA-4 (CD152), 4-1BBL (CD137L), HVEM (CD270), FGL1, OX-2 (CD200), Galectin-9, PVR (CD155), Nectin-2 (CD112) isoform alpha, Nectin-2 (CD112) isoform beta, Nectin-2 (CD112) isoform delta, IL-10, TSG-6, B7-H3 (CD276), B7-H4 (VTCN1), B7-H5 (VISTA), B7-H7 (HHLA2), BTNL1, VSIG8, VSIG3 (IGSF11), VSIG4, TIM-3 (HAVCR2), TIM-4 (TIMD4), CEACAM1, BTN3A1, BTN3A2, BTN2A1, BTNL8, BTN2A2, BTN1A1, TIGIT, CD27L (CD70), CD30L (CD153), GITRL, CD40L (CD154), LIGHT (CD258), TL1, CD80, CD86, LFA-3 (CD58), SLAM (CD150), CD40, CD28, CD28H, CD2, LFA-3 (CD58), CD48, CD226, DR3, DcR3, FasL, TIM-1 (CD365), PD-1, or active fragment thereof.
[0336] 29. A method of producing the engineered extracellular vesicle or the composition of any one of paragraphs 1-30, comprising:
   [0337] (a) providing a population of cells expressing a vector construct encoding one or more sticky binder and one or more signaling domains; and
   [0338] (b) isolating a plurality of artificial synapses from the population of cells.
[0339] 30. A method of producing the engineered extracellular vesicle or the composition of any one of paragraphs 1-30, comprising:
   [0340] (a) providing a population of cells expressing a vector construct encoding one or more sticky binder and one or more signaling domains; and
   [0341] (b) isolating a plurality of artificial synapses from the population of cells; and
   [0342] (c) purifying the plurality of artificial synapses from the population of cells.
[0343] 33. The method of paragraph 31 or paragraph 32, the isolating is via size exclusion chromatography.
[0344] 34. The method of paragraph 32, wherein the purifying is via multimodal chromatography.
[0345] 35. The method of any of paragraphs 31-34, further comprising performing an assay for POI binding to a target polypeptide.
[0346] 36. The method of paragraph 35, wherein the vector construct further encodes a promoter.
[0347] 37. The method of paragraph 36, wherein the promoter is a tissue-specific promoter or an inducible promotor.
[0348] 38. A method of modulating inflammation in a subject, the method comprising:
   [0349] administering a composition comprising a plurality of engineered extracellular vesicles to a subject in need thereof,
   [0350] wherein the engineered extracellular vesicles comprise at least one fusion polypeptide comprising:
      [0351] (i) at least one protein of interest (POI) domain or a fragment thereof, and
      [0352] (ii) at least one vesicle targeting domain.
[0353] 39. The method of paragraph 38, wherein the extracellular vesicle comprises an exosome.
[0354] 40. The method of any one of paragraphs 38-39, further comprising selecting a subject that has or is suspected of having an autoimmune disease or an inflammatory disease or condition.
[0355] 41. The method of any one of paragraphs 38-40, wherein the vesicle targeting domain is selected from the group consisting of: a Glycosylphosphatidylinositol (GPI) anchor, a fatty acetylation site, and a prenylation site.
[0356] 42. The method of any one of paragraphs 38-41, wherein the vesicle targeting domain is a GPI anchor.
[0357] 43. The method of any one of paragraphs 38-41, wherein the vesicle targeting domain is C1C2.
[0358] 44. The method of any one of paragraphs 38-43, wherein the protein of interest (POI) domain comprises one or more of: PD-L1, PD-L2, CTLA-4 (CD152), 4-1BBL (CD137L), HVEM (CD270), FGL1, OX-2 (CD200), Galectin-9, PVR (CD155), Nectin-2 (CD112) isoform alpha, Nectin-2 (CD112) isoform beta, Nectin-2 (CD112) isoform delta, IL-10, TSG-6, B7-H3 (CD276), B7-H4 (VTCN1), B7-H5 (VISTA), B7-H7 (HHLA2), BTNL1, VSIG8, VSIG3 (IGSF11), VSIG4, TIM-3 (HAVCR2), TIM-4 (TIMD4), CEACAM1, BTN3A1, BTN3A2, BTN2A1, BTNL8, BTN2A2, BTN1A1, TIGIT, CD27L (CD70), CD30L (CD153), GITRL, CD40L (CD154), LIGHT (CD258), TL1, CD80, CD86, LFA-3 (CD58), SLAM (CD150), CD40, CD28, CD28H, CD2, LFA-3 (CD58), CD48, CD226, DR3, DcR3, FasL, TIM-1 (CD365), PD-1, or active fragment thereof.
[0359] 45. The method of any one of paragraphs 38-44, wherein the protein of interest (POI) domain is PD-L1 or a fragment thereof.
[0360] 46. The method of any one of paragraphs 38-44, wherein the protein of interest (POI) domain is PD-L2 or a fragment thereof.
[0361] 47. The method of any one of paragraphs 38-44, wherein the protein of interest (POI) domain is CTLA-4 or a fragment thereof.
[0362] 48. The method of any one of paragraphs 38-44, wherein the protein of interest (POI) domain is HVEM or a fragment thereof.
[0363] 49. The method of paragraph 40, wherein the inflammatory disease and/or condition is acute.
[0364] 50. The method of paragraph 40, wherein the inflammatory related disease and/or condition is chronic.
[0365] 51. The method of paragraph 38, wherein administering the composition comprises injection, topical administration, or inhalation.
[0366] 52. Use of a composition comprising a plurality of engineered extracellular vesicles, the engineered extracellular vesicles each comprising:
   [0367] at least one fusion polypeptide comprising:
      [0368] (i) at least one protein of interest (POI) domain or a fragment thereof, and
      [0369] (ii) at least one vesicle targeting domain for the treatment of an inflammatory disease or condition.
[0370] 53. Use of a composition comprising a plurality of engineered extracellular vesicles, the engineered extracellular vesicles each comprising:
   [0371] at least one fusion polypeptide comprising:
      [0372] (i) at least one protein of interest (POI) domain or a fragment thereof, and
      [0373] (ii) at least one vesicle targeting domain for the treatment of an autoimmune disease or condition.
[0374] 54. Use of a composition comprising a plurality of engineered extracellular vesicles, the engineered extracellular vesicles each comprising:
   [0375] at least one fusion polypeptide comprising:
      [0376] (i) at least one protein of interest (POI) domain or a fragment thereof, and
      [0377] (ii) at least one vesicle targeting domain
   [0378] for the treatment of cancer.

### EXAMPLES

[0379] The following examples are provided by way of illustration, not limitation.

### Example 1

### Design of Artificial Synapse

[0380] As described, artificial synapses are engineered to induce and propagate biological signaling, including for example, antagonist and agonist signaling. Artificial synapses are designed to include hallmark biophysical and biochemical features of extracellular vesicles, further including vesicle targeting domains and signaling domains. Vesicle targeting domains capable of attaching to extracellular vesicles such as exosomes, signaling domains, optionally including a linker (e.g., Fc linker), can be organized in genetic vector constructs. Designs are shown in FIG. 1.

[0381] Sticky binders are extracellular vesicle targeting sequences. Preliminary extracellular vesicle targeting sequences of interest are from, but not limited to, 4F2 (CD98), ADAM10, CD298, TFR2, transmembrane domains of CD9, MARCKS, KRAS, etc. or the like as appreciate by one of ordinary skill in the art. The Inventors discovered high efficiency when proteins are engineered with a GPI domain. Optionally, linker regions such as an Fc linker between the vesicle targeting domains and signaling domains can be added.

[0382] A variety of signaling domains are of interest with proof-of-concept examples including PD-L1, PD-L2 and CTLA-4 (CD152). Artificial synapses including these three signaling domains are shown in FIGS. 2-5.

[0383] Each of these elements are described in the following non-limiting examples.

### Example 2

### Genetic Constructs

[0384] Examples of constructs including these variable elements (e.g., sticky binders GPI or C1C2, or signaling domains including PD-L1, PD-L2 and CTLA-4 (CD152) were engineered into vectors shown in FIGS. 2-5.

### Example 3

### Purification of hPD-L1 Tagged Artificial Synapses by a Multimodal Resin Marketed for Exosome Purification

[0385] Upon expression of hPD-L1-Fc-GPI in mammalian cells, artificial synapses were further purified using a size exclusion resin marketed for exosome purification. Large MW artificial synapses elute in the first fraction as shown by the high hPD-L1 concentration and exosome quantity (2.26E9 artificial synapses/ml) in elution 1. Clean in place (CIP) fractions show bound and eliminated proteins from the Inventors' exosome elution. Results are shown in FIG. 6.

### Example 4

### hPDL1-Fc-GPI Exosome Purification—Size Exclusion Chromatography Column

[0386] Artificial synapses engineered from exosomes such as hPDL1-Fc-GPI after elution from size exclusion resin marketed for exosome purification can be further purified via a size exclusion column as shown here. Using a size exclusion chromatography (SEC), artificial synapses elute in fractions 7-9. Total protein (determined by qBit) and hPD-L1 ng/ml (determined by ELISA) of each fraction is shown in the graph. Bars show exosome number per ml (i.e. 1E10 artificial synapses/ml etc.). Fractions 7-9 contain >99% purified artificial synapses. Fractions 7-9 are pooled and may be concentrated using a filtration device, for example a 10K MWCO Amicon Centrifugal Filter. Final purified product is filtered through a low protein binding 0.2 μm or 0.45 μm filter, for example a PES filter. Results are shown in FIG. 7.

### Example 5

### hPD-L1 Expression on Artificial Synapses

[0387] Exosome quantity and hPD-L1 concentration was determined in SEC fractions 7-9. Knowing the molecular weight of engineered hPD-L1, the Inventors can determine the number of hPD-L1 molecules per exosome to be approximately between 12 to 40 PD-L1/exosome. This value is consistent between different purification runs and constructs. Results are shown in FIG. 8.

### Example 6

### Purification of hPD-L2-Fc-GPI Artificial Synapses Via Multimodal Resin Chromatography Marketed for Exosome Purification

[0388] This graph shows Abs 280 of multimodal resin chromatography fractions and quantity of hPDL2 in indicated fractions. Artificial synapses eluted in Elution 1.

[0389] Clean in place (CIP) fractions show bound and eliminated proteins from the Inventors' exosome elution. Results are shown in FIG. 9.

### Example 7

### PD-L2 Purification Via Size Exclusion Chromatography

[0390] Artificial synapses engineered from artificial synapses such as hPDL2-GPI after elution from size exclusion resin size exclusion resin marketed for exosome purification are further purified via size exclusion chromatography as shown. Results are shown in FIG. 10.

### Example 8

### hCTLA4-Fc-GPI Exosome Purification Via Size Exclusion Chromatography

[0391] Using size exclusion chromatography marketed for exosome purification, artificial synapses elute in fractions 7-9. Total protein (determined by qBit) and hPD-L1 ng/ml (determined by ELISA) of each fraction is shown in the graph. Fractions 7-9 are pooled and contain >99% purified artificial synapses. Pooled artificial synapses engineered from artificial synapses fractions may then be concentrated using a filtration device, for example a 10K MWCO Amicon. Final purified product is filtered through a low protein binding filter, for example a 0.2 μm or 0.45 um PES filter. Results are shown in FIG. 11.

### Example 9

### PD-L1 and PD-L2 In Vitro Assay from DiscoverX

[0392] To perform this validation method, the Inventors modified the PathHunter PD-1 Signaling Bioassay from DiscoverX Briefly, the PathHunter PD-1 Signaling Bioassay relies on the well-established PathHunter Enzyme Fragment Complementation (EFC) technology to interrogate receptor activity. EFC consists of a split β-galactosidase (β-gal) enzyme: the Enzyme Donor (ED) and Enzyme Acceptor (EA) fragments which independently have no β-gal activity. However, when forced to complement they form an active β-gal enzyme that will hydrolyze substrate to produce a chemiluminescent signal. The PathHunter PD-1 Signaling Bioassay consists of human cells engineered to stably express an ED-tagged PD-1 receptor, while EA is fused to the phosphotyrosine-binding SH2 domain of the intracellular signaling protein, SHP1. Ligand or antibody-induced activation of the receptor results in phosphorylation of the receptor's cytosolic tail. The SH2-domain fused to EA binds the phosphorylated receptor, forcing complementation of ED and EA, resulting in formation of an active β-gal enzyme, which hydrolyzes the substrate to produce a chemiluminescent signal. Full-length PD-1 receptor was engineered with a small β-gal fragment (ED in red) fused to its C-terminus, and the SH2-domain of SHP1 was engineered with the complementing β-gal fragment (EA). These constructs were stably expressed in Jurkat cells (produced by DiscoverX), while PD-L1 and PD-L2 was stably expressed on artificial synapses produced by Diadem Biotherapeutics. Artificial synapses were engineered to have surface expressed human PD-L1 or PD-L2. Briefly, the gene sequence coding for the extracellular domain of human PD-L1 or PD-L2 was linked to the exosome via a glycosylphosphatidylinositol (GPI) linker with an Fc domain between the linker and PD-L1 or PD-L2 (PD-L1-Fc-GPI and PD-L2-Fc-GPI). Additional variations of the Inventors' PD-L1 and PD-L2 artificial synapses include cloning a C1C2 linker (from MFGE8) in place of the GPI linker, and with or without the Fc domain. The Inventors also cloned murine versions of PD-L1 and PD-L2 extracellular domains in place of the human PD-L1 and PD-L2 all variations. Ligand engagement, through addition of ligand-presenting artificial synapses, results in phosphorylation of PD-1, leading to the recruitment of SHP1-EA

[0393] The Inventors obtained approximately 1000× higher increase in Relative Light Units (RLU) in Jurkat signaling cells treated with PD-L1 or PD-L2 labeled artificial synapses when compared to soluble PD-L1-Fc or PD-L2-Fc ligand, respectively. Meaning, it took 1000× less ug/ml of PD-L1 or PD-L2 on artificial synapses than solubilized PD-L1-Fc or PD-L2 ligand to achieve the same RLU signaling. Results are shown in FIG. 12.

### Example 10

### PD-L1 In Vivo Assay—Experimental Autoimmune Uveoretinitis (EAU) in Lewis Rats Bioassay

[0394] Experimental autoimmune uveoretinitis (EAU) is an organ-specific, T lymphocyte-mediated autoimmune disease, which serves as a model for several human ocular inflammations of an apparently autoimmune nature. There is a statistically significant initial reduction in EAU in mPDL1 artificial synapse treated rats via either the intravitreal and intravenous delivery modes. 2nd intravitreal and 3rd intravenous injections are performed on Day 12. There appears to be a more rapid rate of resolution in the 1× intravitreal and intravenous groups. (C) Simplified view of aforementioned results. (D) Weight of rats was monitored throughout the study. 3rd intravitreal and 4th intravenous injections are performed on Day 16. There does not appear to be any significant change in EAU in any of the test groups. The aforementioned results provide proof of principle of successfully immunizing the rats with human cell derived artificial synapses with mouse PDL1 injected into rats. Results are shown in FIG. 13.

### Example 11

### Engineered Exosome Multivalent Display

[0395] The inventors have developed the following 3 types of protein display on or within exosomes:
[0396] Type I membrane proteins wherein the N-Terminus is on the luminal (interior) side of the exosome membrane and the C-Terminus is on the exterior of the exosome.
[0397] Type II membrane proteins wherein the N-Terminus is on the exterior while the C-Terminus is on the interior.
[0398] Luminal internally loaded proteins which are linked to the exosome by a Myristoylation/Palmitoylation site which attaches proteins to the interior of the exosome membrane.

[0399] FIGS. 14-21 demonstrate the various embodiments of the engineered extracellular vesicles.

[0400] Additional embodiments or ligands displayed on the exosome surface (Type I and Type II membrane proteins) and internal luminal display can include the following:
[0401] Type I: PD-L1, PD-L2, FGL1, OX40L
[0402] Type II: 4-1BBL, GITRL, CD27L, CD30L
[0403] Luminal: NanoLuc® luciferase; Green fluorescent protein (GFP) (e.g., eGFP, etc.); Red fluorescent protein (RFP) (e.g., mScarlet, mCherry, mRuby, tdTomato, etc.); Cyan fluorescent protein (CFP); Yellow fluorescent protein (YFP); A therapeutic protein; and CRISPR/CAS-9

[0404] FIG. 20 shows an exemplary multiple protein display construct. Sequences such as P2A, E2A, F2A, and T2A induce ribosomal slippage which prevent peptide bond formation, meaning that a single mRNA transcript with a 2A sequence will result in two separate peptides after translation. This allows the expression of two separate proteins from one promoter region and thus loading of two proteins on an exosome. Any combination of the proteins of interest domains provided herein can be engineered. Furthermore, a cell line with multiple transgene inserts under separate promoter control. Either method can be used to label Type I, Type II, and luminal display proteins.

### Example 12a

### Designed and Engineered Human Fusion Polypeptide Constructs

[0405] The inventors have designed, engineered, and purified the following human fusion polypeptide constructs for therapeutic use (FIG. 5A-FIG. 5WW):
[0406] pEF5-FRT-hPDL1-C1C2 (FIG. 5I)
[0407] pEF5-FRT-hPDL2-C1C2 (FIG. 5J)
[0408] pEF5-FRT-hPDL1-GPI-P2A-hFGL1-GPI (FIG. 5E)
[0409] pEF5-FRT-hCTLA4-Fc-GPI (FIG. 5C)
[0410] pEF5-FRT-hPDL2-Fc-GPI (FIG. 5H)
[0411] pEF5-FRT-hPD-L1-GPI-P2A-hHVEM-GPI (FIG. 5D)
[0412] pEF5-FRT-hPDL1-GPI (FIG. 5F)
[0413] pcDNA5-FRT-hSecPDL1-GPI (FIG. 5O)
[0414] pcDNA5-FRT-hPDL1-GPI (FIG. 5F)
[0415] pcDNA5-FRT-hPDL1-Link-GPI (FIG. 5T)
[0416] pcDNA5-FRT-4F2-h41BBL (FIG. 5K)
[0417] pcDNA5-FRT-Tfr2-h41BBL (FIG. 5P)
[0418] pEF5-FRT-hPDL1-Fc-GPI (FIG. 5G)
[0419] pcDNA5-FRT-CD9tm3-h41BBL (FIG. 5Q)
[0420] pcDNA5-FRT-hPDL1-Fc-GPI (FIG. 5G)
[0421] pcDNA5-FRT-hPDL1-4Fc-CD9tm2 (FIG. 5RR)
[0422] pcDNA5-FRT-hPDL1-Fc-CD9tm2KRAS (FIG. 5UU)
[0423] pcDNA5-FRT-hPDL1-4Fc-CD9tm2KRAS (FIG. 5SS)
[0424] pcDNA5-FRT-hPDL1-4Fc-GPI (FIG. 5L)
[0425] pcDNA5-FRT-hPDL1-ADAM10 (FIG. 5QQ)
[0426] pcDNA5-FRT-MyrPalm-4F2-h41BBL (FIG. 5R)
[0427] pcDNA5-FRT-MyrPalm-h41BBL (FIG. 5S)
[0428] pcDNA5-FRT-hPDL1-Fc-CD9tm2 (FIG. 5TT)
[0429] pcDNA5-FRT-hSecPDL1-CD9tm4 (FIG. 5W)
[0430] pcDNA5-FRT-hSecPDL1-CD9tm2KRas (FIG. 5V)
[0431] pcDNA5-FRT-hSecPDL1-CD9tm2 (FIG. 5U)
[0432] pcDNA5-FRT-hSecPDL1-CD81 (FIG. 5X)
[0433] pEF5-FRT-hCD200-Fc-GPI (FIG. 5Y)
[0434] pEF5-FRT-hCD200-GPI (FIG. 5BB)
[0435] pEF5-FRT-hTSG6-GPI (FIG. 5FF)
[0436] pEF5-FRT-hPDL2-GPI (FIG. 5EE)
[0437] pEF5-FRT-hFGL-1-GPI (FIG. 5Z)
[0438] pEF5-FRT-hHVEM-GPI (FIG. 5DD)
[0439] pEF5-FRT-hGal9-GPI (FIG. 5CC)
[0440] pEF5-FRT-hHVEM-Fc-GPI (FIG. 5GG); and
[0441] pEF5-FRT-hGal9-Fc-GPI (FIG. 5AA)

### Example 12b

### Designed and Engineered Fusion Polypeptide Constructs

[0442] The inventors have designed, engineered, and purified the following mouse fusion polypeptide constructs for therapeutic use (FIG. 5A-FIG. 5WW):
[0443] pcDNA5-FRT-mPDL1-mFc-CD9tm2KRAS (FIG. 5WW)
[0444] pcDNA5-FRT-mPDL1-mFc-CD9tm2 (FIG. 5VV)
[0445] pcDNA5-FRT-mPDL1-mFc-GPI (FIG. 5NN)
[0446] pcDNA5-FRT-mPDL1-GPI (FIG. 5KK)
[0447] pEF5-FRT-mPDL2-GPI (FIG. 5.OO)
[0448] pEF5-FRT-mPDL1-GPI-P2A-mHVEM-GPI (FIG. 5PP)
[0449] pEF5-FRT-mPDL1-GPI (FIG. 5KK)
[0450] pEF5-FRT-mPDL2-Fc-GPI (FIG. 5MM)
[0451] pEF5-FRT-mPDL1-Fc-GPI (FIG. 5JJ)
[0452] pEF5-FRT-mCTLA4-Fc-GPI (FIG. 5HH)
[0453] pEF5-FRT-mPDL1-C1C2 (FIG. 5II); and
[0454] pEF5-FRT-mPDL2-C1C2 (FIG. 5LL).

### Example 12c

### Designed and Engineered Luminal Loaded Fusion Polypeptide Constructs

[0455] The inventors have designed, engineered, and purified the following fusion polypeptide constructs for internal luminal loading of the fusion polypeptide:
[0456] pcDNA5-FRT-Myr-NanoLuc (FIG. 5M)
[0457] pcDNA5-FRT-Myr-mScarlet (FIG. 5N)

### Example 13

### Purification of Exosomes Labeled with Type I Membrane Fusion Polypeptides

[0458] The inventors have purified engineered EVs, including hPD-L1-GPI; hPDL1-Fc-GPI; hPDL2-Fc-GPI; hCTLA4-Fc-GPI; mPDL1-GPI; and mPD-L1-Fc-GPI. The process for purification and analytical processing of the engineered EVs are shown in the flow chart provided in FIG. 21.

[0459] Size exclusion chromatography was performed to purify hPD-L1-GPI (no Fc) exosomes (FIG. 24). Protein, RNA and DNA measurements in SEC fractions. Invitrogen Qubit fluorometric assays were used to measure biomolecules from unmodified concentrated cell media SEC fractions or hPD-L1-Exo-Tag concentrated cell media SEC fractions. PD-L1 was measured using an R&D systems PD-L1 ELISA kit. Dot-blot immunoblot analysis of SEC fractions. A 96-well dot blot apparatus was used to immobilize 50 ul of each SEC fraction onto PVDF. Exosome size and concentration was measured in fraction 7 by tunable resistive pulse sensing (TRPS). It was confirmed that GPI anchors the hPD-L1 fusion protein onto the exosomes (FIG. 25).

[0460] Furthermore, a commercially available multimodal exosome purification resin was also used to purify and isolate PD-L1-GPI exosomes and PD-L1-Fc-GPI exosomes. Fraction 7 was further analyzed by dot blots (FIG. 28A-28B). In particular, FIG. 28B shows SEC purification results of various embodiments of human PD-L1 displayed on the surface of extracellular vesicles. One embodiment is the hPD-L1-4Fc-GPI (CMV) construct as seen in the top dot blot (stained with rabbit monoclonal anti-PD-L1 antibody). Another embodiment is the hPD-L1-4Fc-GPI (EF1a) as seen in the top dot blot (stained with rabbit monoclonal anti-PD-L1 antibody).

[0461] Large MW exosomes elute in the first fraction as shown by the high hPD-L1 concentration and exosome quantity (2.26E9 exosomes/ml) in elution 1. Clean in place (CIP) fractions show bound and eliminated proteins from our exosome elution. Exosome quantity and hPD-L1 concentration was determined in SEC fractions 7-9. Knowing the molecular weight of engineered hPD-L1, we can determine the number of hPD-L1 molecules per exosome to be approximately 12 PD-L1/exosome. This value is consistent between different purification runs and constructs (FIG. 8).

[0462] Human hPD-L2 and hCTLA-4-Fc-GPI SEC fractions were purified. In addition, purification of the mouse PD-L1-FcGPI exosomes was performed (FIG. 29). The mouse Fc-PD-L1 expressing exosomes have a higher valency than those that do not comprise the Fc linker.

### Example 14

### Comparative Proteomics Analysis of the Engineered EVs

[0463] Fc-GPI enables high density display and has a higher abundance than endogenous PTGFRN or CD81. Therefore, comparison proteomics of transprotein expression and surface labeling on the engineered exosomes, hPD-L1-Fc-GPI; hPD-L2-Fc-GPI; and hCTLA-Fc-GPI, was performed to determine the effects on endogenous protein expression in engineered exosomes. It was confirmed that the fusion polypeptide expression does not affect the relative expression of native and associated exosome proteins. However, the trans protein may crowd out abundant proteins like CD81 (data not shown).

### Example 15

### Scale-Up Production and Purification of mPD-L1-Fc-GPI Exosomes Using Microcarriers in a Stirred Tank Single-Use Bioreactor (STR)

[0464] 1E7 HEK 293 cells were utilized for the production of mPDL1-Fc-GPI exosomes. Cells were passaged on SoloHill® Microcarriers up to Passage 4, at which point cells were expanded in a 2.5 L Stirred Tank Single-Use Bioreactor. Passage 4 cells were cultured for an additional 5 days and media was harvested on Day 5 and used for exosome purification. The general aim and process is provided below

AIM: Utilize SoloHill's Xeno-free microcarrier technology to scale up cells for engineering EVs and evaluate Microcarrier-stir tank bioreactor technology for production of therapeutic exosomes in the Xeno-free medium conditions.

### Passage 1:

[0465] Thaw vial (1.00E+07) of cells and seed Corning T-150 & CellSTACK2 tissue culture treated flask at 1.00E+04 cells per cm2 seed density.
Perform 100% medium exchange from both flasks on day 3.
Harvest Corning T-150 & CellSTACK2 flasks on day 4 post seeding and seed spinner microcarrier culture.

### Passage 2:

[0466] Expand cells in 2×200 mL spinner flasks at 10 cm2/mL microcarrier density using SoloHill's Xeno-free prototype microcarrier.
Seed microcarrier cultures at 1.00E+04 cells per cm2 seed density and T-25 as flatware control flask.
Perform 80% batch volume medium exchange from spinners and T-25 flasks on day 3.
Harvest both microcarrier and T-25 flasks on day 4 post seeding and seed spinner microcarrier culture.

### Passage 3:

[0467] Expand cells in 3×300 mL spinner flasks at 10 cm2/mL microcarrier density using SoloHill's Xeno-free prototype microcarrier.
Seed microcarrier cultures at 1.00E+04 cells per cm2 seed density and T-25 as flatware control flask.
Perform 80% batch volume medium exchange from spinners and T-25 flasks on day 3.
Harvest both microcarrier and T-25 flasks on day 4 post seeding.
Seed microcarrier-stir tank bioreactor for exosome production.

### Passage 4:

[0468] Expand cells into a 2.5 L microcarrier-stir tank at 10 cm2/mL surface area to medium ratio.
Seed cultures at 1.00E+04 cells per cm2 seed density and T-25 as flatware control flask.
Perform 80% batch volume medium exchange on day 2.
On day 3 rinse all cultures with 2× cell culture volumes of DPBS containing Ca and Mg.
Add exosome production medium (DMEM-1% Glutamax) to all cultures at 10 cm2/mL surface area to medium volume ratio.
On day 5 collect harvest spent medium from all cultures, filter using 0.45 μm Nalgene rapid flow system and freeze at −20° C.

### Procedures:

### Medium Composition

### DMEM 1× (Corning ref #10-013-CV)

### 1% Glutamax (Thermo ref #35050061)

[0469] 3% Human platelet lysate (Stemulate from Cook Reagentec PG-NH-500)

### Cell Harvest Protocol for Planar Culture

[0470] Settle microcarriers and remove maximum volume of spent medium without removing microcarriers.
Wash microcarrier culture with DPBS 2× time at 0.1 mL/cm2 volume to surface area ratio.
Add 37° C. warmed TrypLE 5× enzyme at 0.012 mL/cm2 and incubate flask at room temperature for ˜15 minutes.
Add complete medium at 0.024 mL/cm2 to quench TrypLE 5× activity.
Perform viable cell count using NC200 cell count instrument.

### Nuclei Count Protocol for Microcarrier Culture

[0471] Obtain 4-5 mL of microcarrier culture from bioreactor or spinner flask
Settle microcarriers and remove maximum volume of spent medium without removing microcarriers.
Add 1.5 mL Nucleocounter Reagent A to macrocarrier sample tube and vortex at high speed for a minute.
Add 1.5 mL Nucleocounter Reagent B to macrocarrier sample tube and vortex at high speed for a minute.
Perform nuclei count using NC200 nuclei count instrument.
Medium Collection from STR Bioreactor
Stop all controls and settle microcarriers in the bioreactor vessel.
Pump out medium through screen bag into collection bottle at 200 mL/minute flowrate using peristaltic pump.
Inside BSC pour medium into 0.45 μm Nalgene rapid flow filter system and remove free floating cells.
Freeze medium bottles in minus 20° C. freezer.
Medium Collection from Spinner Flasks
Inside BSC pour microcarrier culture into 0.45 μm Nalgene rapid flow filter system and remove free floating cells as well as microcarriers.
Freeze medium bottles in minus 20° C. freezer.

Cell culture set points

| | Temperature | Agitation | Dissolved | Oxygen | Incubator % |
|---|---|---|---|---|---|
| | ° C. | rpm | (DO) % | pH | CO₂ setting |
| T-Flask | 37 | n/a | n/a | n/a | 5 ± 1 |
| CellSTACK 2 | 37 | n/a | n/a | n/a | 5 ± 1 |
| Spinner flask | 37 | 35 | n/a | n/a | 5 ± 1 |
| STR bioreactor | 37 | 35 | 50 | 7.35 | n/a |

FIG. 31 shows mPDL1-Fc-GPI production, growth parameters, and analyte concentrations from a 2.6 L culture in a Stirred Tank Single-Use (STR) bioreactor. Day 2: 80% batch volume medium was exchanged (1^{st} increase in glucose and decreased in lactate) Day 3: rinse culture with 2× cell culture volumes of DPBS containing Ca and Mg. (2^{nd} increase in glucose and decreased in lactate). Add exosome production medium (DMEM-1% Glutamax) to culture at 10 cm²/mL surface area to medium volume ratio.

[0472] mPDL1 was purified using the purification process outlined above (FIGS. 32-33).

### Example 16

### PD-L1-Fc-GPI and PDL2-Fc-GPI Exosomes Increase PD-1 Signaling

[0473] The purified exosomes were tested using the modified DiscoverX Assay in FIG. 12A. Approximately a 1000× increase in Relative Light Units (RLU) was achieved for Jurkat signaling cells treated with PD-L1 or PD-L2 labeled exosomes when compared to soluble PD-L1-Fc or PD-L2-Fc ligands alone, respectively. Therefore, it takes 1000× less μg/ml of PD-L1 or PD-L2 on the engineered exosomes to activate PD-1 over solubilized ligands, PD-L1-Fc or PD-L2, achieve the same RLU signaling. FIG. 12B show a dose-response curves for the PD-L1 and PD-L2 exosomes vs soluble PD-L1 and PD-L2 signaling bioassay. FIG. 12B shows dose-response curves for the PD-L1 and PD-L2 exosomes comprising an Fc linker and GPI sticky binder vs. soluble ligands with an Fc domain linker. These results show that the PD-L1 and PD-L2 polypeptides fused with the Fc and GPI domains on EVs have a more potent effect on PD-1 signaling than the soluble ligands alone.

### Example 17

### In Vivo Assay—Therapeutic Effect of mPD-L1 Exosomes in an Experimental Autoimmune Uveoretinitis (EAU) Model in Lewis Rats

[0474] Lewis rats were challenged with retinal antigen interphotoreceptor retinoid-binding protein (IRBP) peptide. This model can be used to study anterior and posterior chamber dependent EAU. Rats were immunized on Day 1 with EAU presenting typically at Day 6. Clinical scores in the rat were determined. The EAU dosing schedule is shown in FIG. 13A. EAU dosing test article are shown in the following table.

EAU dosing test articles

| | | mPD-L1-Fc-GPI | mPD-L1-Fc-GPI | mPD-L1 |
|---|---|---|---|---|
| | Unmodified | Exosomes 1X | Exosomes 10X | Exosomes |
| | Exosomes (IVT) | (IVT) | (IVT) | (IV) |
| Dose | 2 ul | 2 ul | 2 ul | 5 ml/kg |
| Total protein | 40 ug/ml | 40 ug/ml | 400 ug/ml | 40 ug/ml |
| concentration | | | | |
| Total protein | 80 ng/eye | 80 ng/eye | 800 ng/eye | 50 ug/animal |
| administered | | | | (~200 ug/kg) |
| Exosome | 5.7 × 10¹⁰/ml | 2.34 × 10¹⁰/ml | 2.34 × 10¹¹/ml | 2.34 × 10¹⁰/ml |
| concentration | | | | |
| Total exosomes | 4.7 × 10⁷ | 4.7 × 10⁷ | 4.7 × 10⁸ | 2.93 × 10¹⁰ |
| administered | | | | |

*IVT-intravitreal,
IV-intravenous

The study design is outlined below.

| Group | Test Article | N | Route | Concentration | Dosage | | Regimen |
|---|---|---|---|---|---|---|---|
| 1 | Cyclosporine | 8 | p.o. | 1 mg/mL | 10 | mg/kg | BID from day |
| | | | | | | | 0 to Day 20 |
| 2 | Negative control | 8 | Intravitreal | 1× | 2-3 | μL | Day 6, Day 12, |
| | (PBS vehicle) | | both eyes | | | | and Day 16 |
| 3 | Unmodified | 8 | Intravitreal | 1 × (~40 ug/ml) | 2-3 | μL | Day 6 and Day |
| | exosomes | | both eyes | | | | 12 |
| | (Control | | | | | | |
| | exosomes) | | | | | | |
| 4 | mPD-L1-Fc-GPI | 8 | Intravitreal | 1 × (~40 ug/ml) | 2-3 | μL | Day 6, Day 12, |
| | (40 ug/ml) | | both eyes | | | | and Day 16 |
| 5 | mPD-L1-Fc-GPI | 4 | Intravenous | 1 × (~40 ug/ml) | 5 | mL/kg | Day 1, Day 6, |
| | (40 ug/ml) | | Injection | | | | Day 12, and |
| | | | | | | | Day 16 |
| 6 | No IRBP peptide | 4 | Intravitreal | 1 × (~40 ug/ml) | 2-3 | μL | Day 6, Day 12, |
| | but treated with | | both eyes | | | | and Day 16 |
| | Test Agent | | | | | | |
| | B (for tolerability) | | | | | | |
| 7 | mPD-L1-Fc-GPI | 8 | Intravitreal | 1 × (400 ug/ml) | 2-3 | μL | Day 6, Day 12, |
| | (400 ug/ml) | | both eyes | | | | and Day 16 |

Clinical Scores were determined as follows:

EAU Clinical Scores in Rats

| Score | Clinical Criteria |
|---|---|
| 0 | No disease; eye is translucent and reflects light(red reflex) |
| 0.5 (trace) | Dilated blood vessels in the iris |
| 1 | Engorged blood vessels in the iris; abnormal pupil contraction |
| 2 | Hazy anterior chamber; decreased red reflex |
| 3 | Moderately opaque anterior chamber, but pupil still visible; dull red reflex |
| 4 | Opaque anterior chamber and obscured pupil; red reflex absent; proptosis |

Each higher grade includes the criteria of the preceding one.

[0475] It was discovered that there is a statistically significant initial reduction in EAU in mPDL1 exosome treated rats via either the intravitreal and intravenous delivery modes as compared with untreated animals (FIG. 13A). Rat weight did not change post immunization (FIG. 13C).

### Example 18

### Purification of Exosomes Labeled with Type II Membrane Proteins

[0476] The inventors designed, engineered, and purified pcDNA5-FRT-4F2-4-1BBL exosomes by the methods provided herein (FIG. 34). Several embodiments of the 4-1BBL labeled exosomes are shown in FIG. 35. Cell expression of the 4F2-4-1BBL was confirmed (data not shown). FIGS. 92A-92B shows the purification of 4F2-4-1BBL exosomes.

### Example 19

### Purification of Luminal Labeled Exosomes (Internal Loading)

[0477] In addition to Type I and Type II display fusion proteins on the surface of an EV, exosomes can be loaded with fusion proteins that are localized to the lumen of the phospholipid bilayer of the exosome (FIG. 37). The Myr/Palm sequence used herein when fused to mScarlet the fusion protein into the luminal interior of extracellular vesicles. Fluorescence at an excitation wavelength 470 nm and emission wavelength of 665-720 nm peaks in SEC fractions 7, 8, and 9. SEC fractions 7, 8, and 9 contain exosomes as demonstrated by the dot blot. Fraction 8 was further analyzed for exosome quantification using an ExoView system (FIG. 38). Unmodified exosomes do not show fluorescence. Exosomes show near 80% loading with Myr/Palm-mScarlet. The remaining 20% were out of the detection limit. Thus, nearly 100% internal loading was achieved using the specific Myr/Palm sequence.

[0478] NanoLuc luciferase expressing exosomes were also purified with the Myr/Palm sequence incorporated into the vector encoding the fusion polypeptide. A Qubit fluorometer was used to measure total protein and Promega Nano-Glo substrate and plate luminometer to measure luminescence (FIG. 39A). Tetraspanin characterization of exosomes was performed and determined that the NanoLuc luciferase exosomes were internally loaded and purified in fraction 8 (FIG. 39B).

The application's sequence listing, which the Patent Office published only in electronic form, follows.

SEQUENCE LISTING (319 sequences)

SEQ ID NO: 1 - DNA, 3634 bp, Homo sapiens
agttctgcgcagcttcccgaggctccgcaccagccgcgcttctgtccgcctgcagggcattccagaaagatgaggatatttgctgtctttatattcatgacctactggcatttgctgaacgcatttactgtcacggttcccaaggacctatatgtggtagagtatggtagcaatatgacaattgaatgcaaattcccagtagaaaaacaattagacctggctgcactaattgtctattgggaaatggaggataagaacattattcaatttgtgcatggagaggaagacctgaaggttcagcatagtagctacagacagagggcccggctgttgaaggaccagctctccctgggaaatgctgcacttcagatcacagatgtgaaattgcaggatgcaggggtgtaccgctgcatgatcagctatggtggtgccgactacaagcgaattactgtgaaagtcaatgccccatacaacaaaatcaaccaaagaattttggttgtggatccagtcacctctgaacatgaactgacatgtcaggctgagggctaccccaaggccgaagtcatctggacaagcagtgaccatcaagtcctgagtggtaagaccaccaccaccaattccaagagagaggagaagcttttcaatgtgaccagcacactgagaatcaacacaacaactaatgagattttctactgcacttttaggagattagatcctgaggaaaaccatacagctgaattggtcatcccagaactacctctggcacatcctccaaatgaaaggactcacttggtaattctgggagccatcttattatgccttggtgtagcactgacattcatcttccgtttaagaaaagggagaatgatggatgtgaaaaaatgtggcatccaagatacaaactcaaagaagcaaagtgatacacatttggaggagacgtaatccagcattggaacttctgatcttcaagcagggattctcaacctgtggtttaggggttcatcggggctgagcgtgacaagaggaaggaatgggcccgtgggatgcaggcaatgtgggacttaaaaggcccaagcactgaaaatggaacctggcgaaagcagaggaggagaatgaagaaagatggagtcaaacagggagcctggagggagaccttgatactttcaaatgcctgaggggctcatcgacgcctgtgacagggagaaaggatacttctgaacaaggagcctccaagcaaatcatccattgctcatcctaggaagacgggttgagaatccctaatttgagggtcagttcctgcagaagtgccctttgcctccactcaatgcctcaatttgttttctgcatgactgagagtctcagtgttggaacgggacagtatttatgtatgagtttttcctatttattttgagtctgtgaggtcttcttgtcatgtgagtgtggttgtgaatgatttcttttgaagatatattgtagtagatgttacaattttgtcgccaaactaaacttgctgcttaatgatttgctcacatctagtaaaacatggagtatttgtaaggtgcttggtctcctctataactacaagtatacattggaagcataaagatcaaaccgttggttgcataggatgtcacctttatttaacccattaatactctggttgacctaatcttattctcagacctcaagtgtctgtgcagtatctgttccatttaaatatcagctttacaattatgtggtagcctacacacataatctcatttcatcgctgtaaccaccctgttgtgataaccactattattttacccatcgtacagctgaggaagcaaacagattaagtaacttgcccaaaccagtaaatagcagacctcagactgccacccactgtccttttataatacaatttacagctatattttactttaagcaattcttttattcaaaaaccatttattaagtgcccttgcaatatcaatcgctgtgccaggcattgaatctacagatgtgagcaagacaaagtacctgtcctcaaggagctcatagtataatgaggagattaacaagaaaatgtattattacaatttagtccagtgtcatagcataaggatgatgcgaggggaaaacccgagcagtgttgccaagaggaggaaataggccaatgtggtctgggacggttggatatacttaaacatcttaataatcagagtaattttcatttacaaagagaggtcggtacttaaaataaccctgaaaaataacactggaattccttttctagcattatatttattcctgatttgcctttgccatataatctaatgcttgtttatatagtgtctggtattgtttaacagttctgtcttttctatttaaatgccactaaattttaaattcatacctttccatgattcaaaattcaaaagatcccatgggagatggttggaaaatctccacttcatcctccaagccattcaagtttcctttccagaagcaactgctactgcctttcattcatatgttcttctaaagatagtctacatttggaaatgtatgttaaaagcacgtatttttaaaatttttttcctaaatagtaacacattgtatgtctgctgtgtactttgctatttttatttattttagtgtttcttatatagcagatggaatgaatttgaagttcccagggctgaggatccatgccttctttgtttctaagttatctttcccatagcttttcattatctttcatatgatccagtatatgttaaatatgtcctacatatacatttagacaaccaccatttgttaagtatttgctctaggacagagtttggatttgtttatgtttgctcaaaaggagacccatgggctctccagggtgcactgagtcaatctagtcctaaaaagcaatcttattattaactctgtatgacagaatcatgtctggaacttttgttttctgctttctgtcaagtataaacttcactttgatgctgtacttgcaaaatcacattttctttctggaaattccggcagtgtaccttgactgctagctaccctgtgccagaaaagcctcattcgttgtgcttgaacccttgaatgccaccagctgtcatcactacacagccctcctaagaggcttcctggaggtttcgagattcagatgccctgggagatcccagagtttcctttccctcttggccatattctggtgtcaatgacaaggagtaccttggctttgccacatgtcaaggctgaagaaacagtgtctccaacagagctccttgtgttatctgtttgtacatgtgcatttgtacagtaattggtgtgacagtgttctttgtgtgaattacaggcaagaattgtggctgagcaaggcacatagtctactcagtctattcctaagtcctaactcctccttgtggtgttggatttgtaaggcactttatcccttttgtctcatgtttcatcgtaaatggcataggcagagatgatacctaattctgcatttgattgtcactttttgtacctgcattaatttaataaaatattcttatttattttgttacttggtacaccagcatgtccattttcttgtttattttgtgtttaataaaatgttcagtttaacatccca

SEQ ID NO: 2 - protein, 290 aa, Homo sapiens
MRIFAVFIFMTYWHLLNAFTVTVPKDLYVVEYGSNMTIECKFPVEKQLDLAALIVYWEMEDKNIIQFVHGEEDLKVQHSSYRQRARLLKDQLSLGNAALQITDVKLQDAGVYRCMISYGGADYKRITVKVNAPYNKINQRILVVDPVTSEHELTCQAEGYPKAEVIWTSSDHQVLSGKTTTTNSKREEKLFNVTSTLRINTTTNEIFYCTFRRLDPEENHTAELVIPELPLAHPPNERTHLVILGAILLCLGVALTFIFRLRKGRMMDVKKCGIQDTNSKKQSDTHLEET

SEQ ID NO: 3 - DNA, 3653 bp, Mus musculus
gaaatcgtggtccccaagcctcatgccaggctgcacttgcacgtcgcgggccagtctcctcgcctgcagatagttcccaaaacatgaggatatttgctggcattatattcacagcctgctgtcacttgctacgggcgtttactatcacggctccaaaggacttgtacgtggtggagtatggcagcaacgtcacgatggagtgcagattccctgtagaacgggagctggacctgcttgcgttagtggtgtactgggaaaaggaagatgagcaagtgattcagtttgtggcaggagaggaggaccttaagcctcagcacagcaacttcagggggagagcctcgctgccaaaggaccagcttttgaagggaaatgctgcccttcagatcacagacgtcaagctgcaggacgcaggcgtttactgctgcataatcagctacggtggtgcggactacaagcgaatcacgctgaaagtcaatgccccataccgcaaaatcaaccagagaatttccgtggatccagccacttctgagcatgaactaatatgtcaggccgagggttatccagaagctgaggtaatctggacaaacagtgaccaccaacccgtgagtgggaagagaagtgtcaccacttcccggacagaggggatgcttctcaatgtgaccagcagtctgagggtcaacgccacagcgaatgatgttttctactgtacgttttggagatcacagccagggcaaaaccacacagcggagctgatcatcccagaactgcctgcaacacatcctccacagaacaggactcactgggtgcttctgggatccatcctgttgttcctcattgtagtgtccacggtcctcctcttcttgagaaaacaagtgagaatgctagatgtggagaaatgtggcgttgaagatacaagctcaaaaaaccgaaatgatacacaattcgaggagacgtaagcagtgttgaaccctctgatcgtcgattggcagcttgtggtctgtgaaagaaagggcccatgggacatgagtccaaagactcaagatggaacctgagggagagaaccaagaaagtgttgggagaggagcctggaacaacggacattttttccagggagacactgctaagcaagttgcccatcagtcgtcttgggaaatggattgagggttcctggcttagcagctggtccttgcacagtgaccttttcctctgctcagtgccgggatgagagatggagtcatgagtgttgaagaataagtgccttctatttattttgagtctgtgtgttctcactttgggcatgtaattatgactggtgaattctgacgacatgatagatcttaagatgtagtcaccaaactcaactgctgcttagcatcctccgtaactactgatacaagcagggaacacagaggtcacctgcttggtttgacaggctcttgctgtctgactcaaataatctttatttttcagtcctcaaggctcttcgatagcagttgttctgtatcagccttataggtgtcaggtatagcactcaacatctcatctcattacaatagcaaccctcatcaccatagcaacagctaacctctgttatcctcacttcatagccaggaagctgagcgactaagtcacttgcccacagagtatcagctctcagatttctgttcttcagccactgtcctttcaggatagaatttgtcgttaagaaattaatttaaaaactgattattgagtagcattgtatatcaatcacaacatgccttgtgcactgtgctggcctctgagcataaagatgtacgccggagtaccggtcggacatgtttatgtgtgttaaatactcagagaaatgttcattaacaaggagcttgcattttagagacactggaaagtaactccagttcattgtctagcattacatttacctcatttgctatccttgccatacagtctcttgttctccatgaagtgtcatgaatcttgttgaatagttcttttattttttaaatgtttctatttaaatgatattgacatctgaggcgatagctcagttggtaaaaccctttcctcacaagtgtgaaaccctgagtcttatccctagaacccacataaaaaacagttgcgtatgtttgtgcatgcttttgatcccagcactagggaggcagaggcaggcagatcctgagctctcattgaccacccagcctagcctacatggttagctccaggcctacaggagctggcagagcctgaaaaacgatgcctagacacacacacacacacacacacacacacacacacacacacacaccatgtactcatagacctaagtgcaccctcctacacatgcacacacatacaattcaaacacaaatcaacagggaattgtctcagaatggtccccaagacaaagaagaagaaaaacaccaaaccagctctattccctcagcctatcctctctactccttcctagaagcaactactattgtttttgtatataaatttacccaacgacagttaatatgtagaatatatattaaagtgtctgtcaatatatattatctctttctttctttcttcctttctttctttctttctttctttctttctttctttctttctttctttcttccttccttccttccttccttccttccttccttcctttctttctttctttctttttttctgtctatctgtacctaaatggttgctcactatgcattttctgtgctcttcgccctttttatttaatgtatggatatttatgctgcttccagaatggatctaaagctctttgtttctaggttttctcccccatccttctaggcatctctcacactgtctaggccagacaccatgtctgctgcctgaatctgtagacaccatttataaagcacgtactcaccgagtttgtatttggcttgttctgtgtctgattaaagggagaccatgagtccccagggtacactgagttaccccagtaccaagggggagccttgtttgtgtctccatggcagaagcaggcctggagccattttggtttcttccttgacttctctcaaacacagacgcctcacttgctcattacaggttctcctttgggaatgtcagcattgctccttgactgctggctgccctggaaggagcccattagctctgtgtgagcccttgacagctactgcctctccttaccacaggggcctctaagatactgttacctagaggtcttgaggatctgtgttctctggggggaggaaaggaggaggaacccagaactttcttacagttttccttgttctgtcacatgtcaagactgaaggaacaggctgggctacgtagtgagatcctgtctcaaaggaaagacgagcatagccgaacccccggtggaaccccctctgttacctgttcacacaagcttattgatgagtctcatgttaatgtcttgtttgtatgaagtttaagaaaatatcgggttgggcaacacattctatttattcattttatttgaaatcttaatgccatctcatggtgttggattggtgtggcactttattcttttgtgttgtgtataaccataaattttattttgcatcagattgtcaatgtattgcattaatttaataaatatttttatttattaaaaaaaaaaaaaaaaa

SEQ ID NO: 4 - protein, 290 aa, Mus musculus
MRIFAGIIFTACCHLLRAFTITAPKDLYVVEYGSNVTMECRFPVERELDLLALVVYWEKEDEQVIQFVAGEEDLKPQHSNFRGRASLPKDQLLKGNAALQITDVKLQDAGVYCCIISYGGADYKRITLKVNAPYRKINQRISVDPATSEHELICQAEGYPEAEVIWTNSDHQPVSGKRSVTTSRTEGMLLNVTSSLRVNATANDVFYCTFWRSQPGQNHTAELIIPELPATHPPQNRTHWVLLGSILLFLIVVSTVLLFLRKQVRMLDVEKCGVEDTSSKNRNDTQFEET

SEQ ID NO: 5 - DNA, 2432 bp, Homo sapiens
actctcatgttacggcaaaccttaagctgaatgaacaacttttcttctcttgaatatatcttaacgccaaattttgagtgcttttttgttacccatcctcatatgtcccagctagaaagaatcctgggttggagctactgcatgttgattgttttgtttttccttttggctgttcattttggtggctactataaggaaatctaacacaaacagcaactgttttttgttgtttacttttgcatctttacttgtggagctgtggcaagtcctcatatcaaatacagaacatgatcttcctcctgctaatgttgagcctggaattgcagcttcaccagatagcagctttattcacagtgacagtccctaaggaactgtacataatagagcatggcagcaatgtgaccctggaatgcaactttgacactggaagtcatgtgaaccttggagcaataacagccagtttgcaaaaggtggaaaatgatacatccccacaccgtgaaagagccactttgctggaggagcagctgcccctagggaaggcctcgttccacatacctcaagtccaagtgagggacgaaggacagtaccaatgcataatcatctatggggtcgcctgggactacaagtacctgactctgaaagtcaaagcttcctacaggaaaataaacactcacatcctaaaggttccagaaacagatgaggtagagctcacctgccaggctacaggttatcctctggcagaagtatcctggccaaacgtcagcgttcctgccaacaccagccactccaggacccctgaaggcctctaccaggtcaccagtgttctgcgcctaaagccaccccctggcagaaacttcagctgtgtgttctggaatactcacgtgagggaacttactttggccagcattgaccttcaaagtcagatggaacccaggacccatccaacttggctgcttcacattttcatccccttctgcatcattgctttcattttcatagccacagtgatagccctaagaaaacaactctgtcaaaagctgtattcttcaaaagacacaacaaaaagacctgtcaccacaacaaagagggaagtgaacagtgctatctgaacctgtggtcttgggagccagggtgacctgatatgacatctaaagaagcttctggactctgaacaagaattcggtggcctgcagagcttgccatttgcacttttcaaatgcctttggatgacccagcactttaatctgaaacctgcaacaagactagccaacacctggccatgaaacttgccccttcactgatctggactcacctctggagcctatggctttaagcaagcactactgcactttacagaattaccccactggatcctggacccacagaattccttcaggatccttcttgctgccagactgaaagcaaaaggaattatttcccctcaagttttctaagtgatttccaaaagcagaggtgtgtggaaatttccagtaacagaaacagatgggttgccaatagagttattttttatctatagcttcctctgggtactagaagaggctattgagactatgagctcacagacagggcttcgcacaaactcaaatcataattgacatgttttatggattactggaatcttgatagcataatgaagttgttctaattaacagagagcatttaaatatacactaagtgcacaaattgtggagtaaagtcatcaagctctgtttttgaggtctaagtcacaaagcatttgttttaacctgtaatggcaccatgtttaatggtggttttttttttgaactacatctttcctttaaaaattattggtttctttttatttgtttttaccttagaaatcaattatatacagtcaaaaatatttgatatgctcatacgttgtatctgcagcaatttcagataagtagctaaaatggccaaagccccaaactaagcctccttttctggccctcaatatgactttaaatttgacttttcagtgcctcagtttgcacatctgtaatacagcaatgctaagtagtcaaggcctttgataattggcactatggaaatcctgcaagatcccactacatatgtgtggagcagaagggtaactcggctacagtaacagcttaattttgttaaatttgttctttatactggagccatgaagctcagagcattagctgacccttgaactattcaaatgggcacattagctagtataacagacttacataggtgggcctaaagcaagctccttaactgagcaaaatttggggcttatgagaatgaaagggtgtgaaattgactaacagacaaatcatacatctcagtttctcaattctcatgtaaatcagagaatgcctttaaagaataaaactcaattgttattcttcaacgttctttatatattctacttttgggta

SEQ ID NO: 6 - protein, 273 aa, Homo sapiens
MIFLLLMLSLELQLHQIAALFTVTVPKELYIIEHGSNVTLECNFDTGSHVNLGAITASLQKVENDTSPHRERATLLEEQLPLGKASFHIPQVQVRDEGQYQCIIIYGVAWDYKYLTLKVKASYRKINTHILKVPETDEVELTCQATGYPLAEVSWPNVSVPANTSHSRTPEGLYQVTSVLRLKPPPGRNFSCVFWNTHVRELTLASIDLQSQMEPRTHPTWLLHIFIPFCIIAFIFIATVIALRKQLCQKLYSSKDTTKRPVTTTKREVNSAI

SEQ ID NO: 7 - DNA, 3415 bp, Mus musculus
gaccacatcatttttgttccctttgttggatatatcctaatgtcaaatgtggcatatctttgttgtctccttctgtctcccaactagagagaacacacttacggctcctgtcccgggcaggtttggttgtcggtgtgattggcttccagggaacctgatacaaggagcaactgtgtgctgccttttctgtgtctttgcttgaggagctgtgctgggtgctgatattgacacagaccatgctgctcctgctgccgatactgaacctgagcttacaacttcatcctgtagcagctttattcaccgtgacagcccctaaagaagtgtacaccgtagacgtcggcagcagtgtgagcctggagtgcgattttgaccgcagagaatgcactgaactggaagggataagagccagtttgcagaaggtagaaaatgatacgtctctgcaaagtgaaagagccaccctgctggaggagcagctgcccctgggaaaggctttgttccacatccctagtgtccaagtgagagattccgggcagtaccgttgcctggtcatctgcggggccgcctgggactacaagtacctgacggtgaaagtcaaagcttcttacatgaggatagacactaggatcctggaggttccaggtacaggggaggtgcagcttacctgccaggctagaggttatcccctagcagaagtgtcctggcaaaatgtcagtgttcctgccaacaccagccacatcaggacccccgaaggcctctaccaggtcaccagtgttctgcgcctcaagcctcagcctagcagaaacttcagctgcatgttctggaatgctcacatgaaggagctgacttcagccatcattgaccctctgagtcggatggaacccaaagtccccagaacgtggccacttcatgttttcatcccggcctgcaccatcgctttgatcttcctggccatagtgataatccagagaaagaggatctaggggaagctgtattacggaagaagatctggacctgcggtcttgggagttggaaggatctgatgggaaaccctcaagagacttctggactcaaagtgagaatcttgcaggacctgccatttgcacttttgaaccctttggacggtgacccagggctccgaagaggagcttgtaagactgacaatcttccctctgtctcaagactctctgaacagcaagaccccaatggcactttagacttacccctgggatcctggaccccagtgagggcctaaggctcctaatgactttcagggtgagaacaaaaggaattgctctccgccccacccccacctcctgctttccgcagggagacatggaaattcccagttactaaaatagattgtcaatagagttatttatagccctcatttcctccggggacttggaagcttcagacagggtttttcataaacaaagtcataactgatgtgttttacagcatcctagaatcctggcagcctctgaagttctaattaactggaagcatttaagcaacacgttaagtacccccactgtggtatttgtttctacttttctgtttttaaagtgtgagtcacaaggtaattgttgtaacctgtgatatcactgtttcttgtgtctcttctttcaactacatcttttaaaacaaaacggtgtggggtttggttgttttggtggtagtggtagtgtttctcagtggtatctccttaagaaaaaaaatcatcatgccagtgaattgtttcttcagccatttcagatgggaagctggaatagcctgtcccccaagctaagccttcttccctagctttctgcgtgattttacattgagcattcctgttgctttgtttctataactgtaatgtggtgatgtcattgttagggcacttgagggtgggcgttctggaagtcctttcaggttagtgtttgggggcagggttgctcagaatacataaaggtgctaacttaaactgcagccatggagctcagtgaattcactaaccttcgggctgtccaaatgtgcacattagctactgtgacccctgtaggttagggagcctgaagccagctctttacctggtgtttagactcagcagaatttggagtcaatgggaccaaatggttgtgaaattaagatttgaagtgtgcatcttattttatcaccatctgcccaacaaaacttcagaaaatgcctttgaagcacaaaaatgtaatcgtttatgtgaaatctctgagttgcatttagatgcccattgcagcaaggtggctctctcacagattccacaccttagcctaagataccagacagcaggacagagagaaaagtccttcctggtgtgcaaacttccttacactggacctcgcctctcaggtgtgtgattggtaggccaaatcccgatagccaatcggtgttgggtgctttgtctgctctactgggagtccagtggtacaatggattctggcaaaatgctgccatcttggccctcgctgggctgctttctaggatattcatagagaaagggccgtccagatccagtatcctaaaatcctgagaggagaatataagttagtgtgtctcactataactatctctatgatcggtcacattactatctaacagttaccaaatactatatgcctaatactggtaagcattttatacacaccattggattgaatcctctcaaaatcctcaaaaaggaagttattaatacctccataggcaaggagcccagaacccagagaggtcaggcagtctagttatagatgcctgctttgtttagaagtgaacaagagcatcaaattattaatgtgccctggttattaatgcgccctggttacctgctggatggaacatcaaggtggacttttggcagttgcatacacccagaggtattttggctattcacggattaatttcacacgaagtgtttcagagacatgtgtaggggaagtccgggttcagggggcctaagattcaaactctagcttagctacgtctgacctccctaagcactaacttactatcaaaagaatgagcagtaaaagaatggtgtttactgcctgcctttatcaggcagtgaacgtgcagcgggcaacgaatgcttgataagtgtgtgtcagtgtgaagtcccatgtaccagccgctgtccccactgcaaaagcagcagagcgctcagacatcatcagctgatttaccagcagcagatttcttcttctagtcccatccctgaagaagcttccagcctaggtacattgcatgggctttgtgctccaggagttcctacacagccctcaacttcaacacaggcaaagtgcttactgatcctcatgtatcttacagggtcccctctacccacaatacctcattgctggaacttcaaatcttcctgaataaaagcttgcccgtggtttaatta

SEQ ID NO: 8 - protein, 247 aa, Mus musculus
MLLLLPILNLSLQLHPVAALFTVTAPKEVYTVDVGSSVSLECDFDRRECTELEGIRASLQKVENDTSLQSERATLLEEQLPLGKALFHIPSVQVRDSGQYRCLVICGAAWDYKYLTVKVKASYMRIDTRILEVPGTGEVQLTCQARGYPLAEVSWQNVSVPANTSHIRTPEGLYQVTSVLRLKPQPSRNFSCMFWNAHMKELTSAIIDPLSRMEPKVPRTWPLHVFIPACTIALIFLAIVIIQRKRI

SEQ ID NO: 9 - DNA, 1997 bp, Homo sapiens
gctttctattcaagtgccttctgtgtgtgcacatgtgtaatacatatctgggatcaaagctatctatataaagtccttgattctgtgtgggttcaaacacatttcaaagcttcaggatcctgaaaggttttgctctacttcctgaagacctgaacaccgctcccataaagccatggcttgccttggatttcagcggcacaaggctcagctgaacctggctaccaggacctggccctgcactctcctgttttttcttctcttcatccctgtcttctgcaaagcaatgcacgtggcccagcctgctgtggtactggccagcagccgaggcatcgccagctttgtgtgtgagtatgcatctccaggcaaagccactgaggtccgggtgacagtgcttcggcaggctgacagccaggtgactgaagtctgtgcggcaacctacatgatggggaatgagttgaccttcctagatgattccatctgcacgggcacctccagtggaaatcaagtgaacctcactatccaaggactgagggccatggacacgggactctacatctgcaaggtggagctcatgtacccaccgccatactacctgggcataggcaacggaacccagatttatgtaattgatccagaaccgtgcccagattctgacttcctcctctggatccttgcagcagttagttcggggttgtttttttatagctttctcctcacagctgtttctttgagcaaaatgctaaagaaaagaagccctcttacaacaggggtctatgtgaaaatgcccccaacagagccagaatgtgaaaagcaatttcagccttattttattcccatcaattgagaaaccattatgaagaagagagtccatatttcaatttccaagagctgaggcaattctaacttttttgctatccagctatttttatttgtttgtgcatttggggggaattcatctctctttaatataaagttggatgcggaacccaaattacgtgtactacaatttaaagcaaaggagtagaaagacagagctgggatgtttctgtcacatcagctccactttcagtgaaagcatcacttgggattaatatggggatgcagcattatgatgtgggtcaaggaattaagttagggaatggcacagcccaaagaaggaaaaggcagggagcgagggagaagactatattgtacacaccttatatttacgtatgagacgtttatagccgaaatgatcttttcaagttaaattttatgccttttatttcttaaacaaatgtatgattacatcaaggcttcaaaaatactcacatggctatgttttagccagtgatgctaaaggttgtattgcatatatacatatatatatatatatatatatatatatatatatatatatatatatatatatatattttaatttgatagtattgtgcatagagccacgtatgtttttgtgtatttgttaatggtttgaatataaacactatatggcagtgtctttccaccttgggtcccagggaagttttgtggaggagctcaggacactaatacaccaggtagaacacaaggtcatttgctaactagcttggaaactggatgaggtcatagcagtgcttgattgcgtggaattgtgctgagttggtgttgacatgtgctttggggcttttacaccagttcctttcaatggtttgcaaggaagccacagctggtggtatctgagttgacttgacagaacactgtcttgaagacaatggcttactccaggagacccacaggtatgaccttctaggaagctccagttcgatgggcccaattcttacaaacatgtggttaatgccatggacagaagaaggcagcaggtggcagaatggggtgcatgaaggtttctgaaaattaacactgcttgtgtttttaactcaatattttccatgaaaatgcaacaacatgtataatatttttaattaaataaaaatctgtggtggtcgttttccgga

SEQ ID NO: 10 - protein, 223 aa, Homo sapiens
MACLGFQRHKAQLNLATRTWPCTLLFFLLFIPVFCKAMHVAQPAVVLASSRGIASFVCEYASPGKATEVRVTVLRQADSQVTEVCAATYMMGNELTFLDDSICTGTSSGNQVNLTIQGLRAMDTGLYICKVELMYPPPYYLGIGNGTQIYVIDPEPCPDSDFLLWILAAVSSGLFFYSFLLTAVSLSKMLKKRSPLTTGVYVKMPPTEPECEKQFQPYFIPIN

SEQ ID NO: 11 - DNA, 1933 bp, Mus musculus
ctacacatatgtagcacgtaccttggatcaaagctgtctatataaagtccccgagtctgtgtgggttcaaacacatctcaaggcttctggatcctgttgggttttactctgctccctgaggacctcagcacatttgccccccagccatggcttgtcttggactccggaggtacaaagctcaactgcagctgccttctaggacttggccttttgtagccctgctcactcttcttttcatcccagtcttctctgaagccatacaggtgacccaaccttcagtggtgttggctagcagccatggtgtcgccagctttccatgtgaatattcaccatcacacaacactgatgaggtccgggtgactgtgctgcggcagacaaatgaccaaatgactgaggtctgtgccacgacattcacagagaagaatacagtgggcttcctagattaccccttctgcagtggtacctttaatgaaagcagagtgaacctcaccatccaaggactgagagctgttgacacgggactgtacctctgcaaggtggaactcatgtacccaccgccatactttgtgggcatgggcaacgggacgcagatttatgtcattgatccagaaccatgcccggattctgacttcctcctttggatccttgtcgcagttagcttggggttgtttttttacagtttcctggtcactgctgtttctttgagcaagatgctaaagaaaagaagtcctcttacaacaggggtctatgtgaaaatgcccccaacagagccagaatgtgaaaagcaatttcagccttattttattcccatcaactgaaaggccgtttatgaagaagaaggagcatacttcagtctctaaaagctgaggcaatttcaactttccttttctctccagctatttttacctgtttgtatattttaaggagagtatgcctctctttaatagaaagctggatgcaaaattccaattaagcatactacaatttaaagctaaggagcatgaacagagagctgggatatttctgttgtgtcagaaccattttactaaaagcatcacttggaagcagcataaggatatagcattatggtgtggggtcaagggaacattagggaatggcacagcccaaagaaaggaagggggtgaaggaagagattatattgtacacatcttgtatttacctgagagatgtttatgacttaaataatttttaaatttttcatgctgttattttctttaacaatgtataattacacgaaggtttaaacatttattcacagagctatgtgacatagccagtggttccaaaggttgtagtgttccaagatgtatttttaagtaatattgtacatgggtgtttcatgtgctgttgtgtatttgctggtggtttgaatataaacactatgtatcagtgtcgtcccacagtgggtcctggggaggtttggctggggagcttaggacactaatccatcaggttggactcgaggtcctgcaccaactggcttggaaactagatgaggctgtcacagggctcagttgcataaaccgatggtgatggagtgtaaactgggtctttacactcattttattttttgtttctgcttttgttttcttcaatgatttgcaaggaaaccaaaagctggcagtgtttgtatgaacctgacagaacactgtcttcaaggaaatgcctcattcctgagaccagtaggtttgtttttttaggaagttccaatactaggaccccctacaagtactatggctcctcgaaaacacaaagttaatgccacaggaagcagcagatggtaggatgggatgcacaagagttcctgaaaactaacactgttagtgttttttttttaactcaatattttccatgaaaatgcaaccacatgtataatatttttaattaaataaaagtttcttgtgattgtttt

SEQ ID NO: 12 - protein, 223 aa, Mus musculus
MACLGLRRYKAQLQLPSRTWPFVALLTLLFIPVFSEAIQVTQPSVVLASSHGVASFPCEYSPSHNTDEVRVTVLRQTNDQMTEVCATTFTEKNTVGFLDYPFCSGTFNESRVNLTIQGLRAVDTGLYLCKVELMYPPPYFVGMGNGTQIYVIDPEPCPDSDFLLWILVAVSLGLFFYSFLVTAVSLSKMLKKRSPLTTGVYVKMPPTEPECEKQFQPYFIPIN

SEQ ID NO: 13 - DNA, 1634 bp, Homo sapiens
agtctctcgtcatggaatacgcctctgacgcttcactggaccccgaagccccgtggcctcccgcgccccgcgctcgcgcctgccgcgtactgccttgggccctggtcgcggggctgctgctgctgctgctgctcgctgccgcctgcgccgtcttcctcgcctgcccctgggccgtgtccggggctcgcgcctcgcccggctccgcggccagcccgagactccgcgagggtcccgagctttcgcccgacgatcccgccggcctcttggacctgcggcagggcatgtttgcgcagctggtggcccaaaatgttctgctgatcgatgggcccctgagctggtacagtgacccaggcctggcaggcgtgtccctgacggggggcctgagctacaaagaggacacgaaggagctggtggtggccaaggctggagtctactatgtcttctttcaactagagctgcggcgcgtggtggccggcgagggctcaggctccgtttcacttgcgctgcacctgcagccactgcgctctgctgctggggccgccgccctggctttgaccgtggacctgccacccgcctcctccgaggctcggaactcggccttcggtttccagggccgcttgctgcacctgagtgccggccagcgcctgggcgtccatcttcacactgaggccagggcacgccatgcctggcagcttacccagggcgccacagtcttgggactcttccgggtgacccccgaaatcccagccggactcccttcaccgaggtcggaataacgtccagcctgggtgcagcccacctggacagagtccgaatcctactccatccttcatggagacccctggtgctgggtccctgctgctttctctacctcaaggggcttggcaggggtccctgctgctgacctccccttgaggaccctcctcacccactccttccccaagttggaccttgatatttattctgagcctgagctcagataatatattatatatattatatatatatatatatttctatttaaagaggatcctgagtttgtgaatggacttttttagaggagttgttttgggggggggggggtcttcgacattgccgaggctggtcttgaactcctggacttagacgatcctcctgcctcagcctcccaagcaactgggattcatcctttctattaattcattgtacttatttgcttatttgtgtgtattgagcatctgtaatgtgccagcattgtgcccaggctagggggctatagaaacatctagaaatagactgaaagaaaatctgagttatggtaatacgtgaggaatttaaagactcatccccagcctccacctcctgtgtgatacttgggggctagcttttttctttctttcttttttttgagatggtcttgttctgtcaaccaggctagaatgcagcggtgcaatcatgagtcaatgcagcctccagcctcgacctcccgaggctcaggtgatcctcccatctcagcctctcgagtagctgggaccacagttgtgtgccaccacacttggctaactttttaatttttttgcggagacggtattgctatgttgccaaggttgtttacatgccagtacaatttataataaacactcatttttcctccc

SEQ ID NO: 14 - protein, 254 aa, Homo sapiens
MEYASDASLDPEAPWPPAPRARACRVLPWALVAGLLLLLLLAAACAVFLACPWAVSGARASPGSAASPRLREGPELSPDDPAGLLDLRQGMFAQLVAQNVLLIDGPLSWYSDPGLAGVSLTGGLSYKEDTKELVVAKAGVYYVFFQLELRRVVAGEGSGSVSLALHLQPLRSAAGAAALALTVDLPPASSEARNSAFGFQGRLLHLSAGQRLGVHLHTEARARHAWQLTQGATVLGLFRVTPEIPAGLPSPRSE

SEQ ID NO: 15 - DNA, 1230 bp, Mus musculus
ataaagcacgggcactggcgggagacgtgcactgaccgaccgtggtaatggaccagcacacacttgatgtggaggataccgcggatgccagacatccagcaggtacttcgtgcccctcggatgcggcgctcctcagagataccgggctcctcgcggacgctgcgctcctctcagatactgtgcgccccacaaatgccgcgctccccacggatgctgcctaccctgcggttaatgttcgggatcgcgaggccgcgtggccgcctgcactgaacttctgttcccgccacccaaagctctatggcctagtcgctttggttttgctgcttctgatcgccgcctgtgttcctatcttcacccgcaccgagcctcggccagcgctcacaatcaccacctcgcccaacctgggtacccgagagaataatgcagaccaggtcacccctgtttcccacattggctgccccaacactacacaacagggctctcctgtgttcgccaagctactggctaaaaaccaagcatcgttgtgcaatacaactctgaactggcacagccaagatggagctgggagctcatacctatctcaaggtctgaggtacgaagaagacaaaaaggagttggtggtagacagtcccgggctctactacgtatttttggaactgaagctcagtccaacattcacaaacacaggccacaaggtgcagggctgggtctctcttgttttgcaagcaaagcctcaggtagatgactttgacaacttggccctgacagtggaactgttcccttgctccatggagaacaagttagtggaccgttcctggagtcaactgttgctcctgaaggctggccaccgcctcagtgtgggtctgagggcttatctgcatggagcccaggatgcatacagagactgggagctgtcttatcccaacaccaccagctttggactctttcttgtgaaacccgacaacccatgggaatgagaactatccttcttgtgactcctagttgctaagtcctcaagctgctatgttttatggggtctgagcaggggtcccttccatgactttctcttgtctttaactggacttggtatttattctgagcatagctcagacaagactttatataattcactagatagcattagtaaactgctgggcagctgctagataaaaaaaaatttctaaatcaaagtttatatttatattaatatataaaaataaatgtgtttgt

SEQ ID NO: 16 - protein, 309 aa, Mus musculus
MDQHTLDVEDTADARHPAGTSCPSDAALLRDTGLLADAALLSDTVRPTNAALPTDAAYPAVNVRDREAAWPPALNFCSRHPKLYGLVALVLLLLIAACVPIFTRTEPRPALTITTSPNLGTRENNADQVTPVSHIGCPNTTQQGSPVFAKLLAKNQASLCNTTLNWHSQDGAGSSYLSQGLRYEEDKKELVVDSPGLYYVFLELKLSPTFTNTGHKVQGWVSLVLQAKPQVDDFDNLALTVELFPCSMENKLVDRSWSQLLLLKAGHRLSVGLRAYLHGAQDAYRDWELSYPNTTSFGLFLVKPDNPWE

SEQ ID NO: 17 - DNA, 1702 bp, Homo sapiens
ataccggcccttcccctcggctttgcctggacagctcctgcctcccgcagggcccacctgtgtcccccagcgccgctccacccagcaggcctgagcccctctctgctgccagacaccccctgctgcccactctcctgctgctcgggttctgaggcacagcttgtcacaccgaggcggattctctttctctttctctttctcttctggcccacagccgcagcaatggcgctgagttcctctgctggagttcatcctgctagctgggttcccgagctgccggtctgagcctgaggcatggagcctcctggagactgggggcctcctccctggagatccacccccaaaaccgacgtcttgaggctggtgctgtatctcaccttcctgggagccccctgctacgccccagctctgccgtcctgcaaggaggacgagtacccagtgggctccgagtgctgccccaagtgcagtccaggttatcgtgtgaaggaggcctgcggggagctgacgggcacagtgtgtgaaccctgccctccaggcacctacattgcccacctcaatggcctaagcaagtgtctgcagtgccaaatgtgtgacccagccatgggcctgcgcgcgagccggaactgctccaggacagagaacgccgtgtgtggctgcagcccaggccacttctgcatcgtccaggacggggaccactgcgccgcgtgccgcgcttacgccacctccagcccgggccagagggtgcagaagggaggcaccgagagtcaggacaccctgtgtcagaactgccccccggggaccttctctcccaatgggaccctggaggaatgtcagcaccagaccaagtgcagctggctggtgacgaaggccggagctgggaccagcagctcccactgggtatggtggtttctctcagggagcctcgtcatcgtcattgtttgctccacagttggcctaatcatatgtgtgaaaagaagaaagccaaggggtgatgtagtcaaggtgatcgtctccgtccagcggaaaagacaggaggcagaaggtgaggccacagtcattgaggccctgcaggcccctccggacgtcaccacggtggccgtggaggagacaataccctcattcacggggaggagcccaaaccactgacccacagactctgcaccccgacgccagagatacctggagcgacggctgctgaaagaggctgtccacctggcggaaccaccggagcccggaggcttgggggctccgccctgggctggcttccgtctcctccagtggagggagaggtggggcccctgctggggtagagctggggacgccacgtgccattcccatgggccagtgagggcctggggcctctgttctgctgtggcctgagctccccagagtcctgaggaggagcgccagttgcccctcgctcacagaccacacacccagccctcctgggccagcccagagggcccttcagaccccagctgtctgcgcgtctgactcttgtggcctcagcaggacaggccccgggcactgcctcacagccaaggctggactgggttggctgcagtgtggtgtttagtggataccacatcggaagtgattttctaaattggatttgaattcggctcctgttttctatttgtcatgaaacagtgtatttggggagatgctgtgggaggatgtaaatatcttgtttctcctcaaa

SEQ ID NO: 18 - protein, 283 aa, Homo sapiens
MEPPGDWGPPPWRSTPKTDVLRLVLYLTFLGAPCYAPALPSCKEDEYPVGSECCPKCSPGYRVKEACGELTGTVCEPCPPGTYIAHLNGLSKCLQCQMCDPAMGLRASRNCSRTENAVCGCSPGHFCIVQDGDHCAACRAYATSSPGQRVQKGGTESQDTLCQNCPPGTFSPNGTLEECQHQTKCSWLVTKAGAGTSSSHWVWWFLSGSLVIVIVCSTVGLIICVKRRKPRGDVVKVIVSVQRKRQEAEGEATVIEALQAPPDVTTVAVEETIPSFTGRSPNH

SEQ ID NO: 19 - DNA, 893 bp, Mus musculus
gctcttggcctgaagtttcttgatcaagaaaatggaacctctcccaggatgggggtcggcaccctggagccaggcccctacagacaacaccttcaggctggtgccttgtgtcttccttttgaacttgctgcagcgcatctctgcccagccctcatgcagacaggaggagttccttgtgggagacgagtgctgccccatgtgcaacccaggttaccatgtgaagcaggtctgcagtgagcatacaggcacagtgtgtgccccctgtcccccacagacatataccgcccatgcaaatggcctgagcaagtgtctgccctgcggagtctgtgatccagacatgggcctgctgacctggcaggagtgctccagctggaaggacactgtgtgcagatgcatcccaggctacttctgtgagaaccaggatgggagccactgttccacatgcttgcagcacaccacctgccctccagggcagagggtagagaagagagggactcacgaccaggacactgtatgtgctgactgcctaacagggaccttctcacttggagggactcaggaggaatgcctgccctggaccaactgcagtgcatttcaacaggaagtaagacgtgggaccaacagcacagacaccacctgctcctcccaggtcgtctactacgttgtgtccatccttttgccacttgtgatagtgggagctgggatagctggattcctcatctgcacgcgaagacacctgcacaccagctcagtggccaaggagctggagcctttccaggaacaacaggagaacaccatcaggtttccagtcaccgaggttgggtttgctgagaccgaggaggagacagcctccaactgaacaaattctgggtgacaagacaccgaggagacgt

SEQ ID NO: 20 - protein, 275 aa, Mus musculus
MEPLPGWGSAPWSQAPTDNTFRLVPCVFLLNLLQRISAQPSCRQEEFLVGDECCPMCNPGYHVKQVCSEHTGTVCAPCPPQTYTAHANGLSKCLPCGVCDPDMGLLTWQECSSWKDTVCRCIPGYFCENQDGSHCSTCLQHTTCPPGQRVEKRGTHDQDTVCADCLTGTFSLGGTQEECLPWTNCSAFQQEVRRGTNSTDTTCSSQVVYYVVSILLPLVIVGAGIAGFLICTRRHLHTSSVAKELEPFQEQQENTIRFPVTEVGFAETEEETASN

SEQ ID NO: 21 - DNA, 1237 bp, Homo sapiens
aatgcagttacaggatcctgggaagcagagtgtctggatggaacctgagctgggtctctgactcacttctgactttagttttttcaagggggaacatggcaaaggtgttcagtttcatccttgttaccaccgctctgacaatgggcagggaaatttcggcgctcgaggactgtgcccaggagcagatgcggctcagagcccaggtgcgcctgcttgagacccgggtcaaacagcaacaggtcaagatcaagcagcttttgcaggagaatgaagtccagttccttgataaaggagatgagaatactgtcattgatcttggaagcaagaggcagtatgcagattgttcagagattttcaatgatgggtataagctcagtggattttacaaaatcaaacctctccagagcccagcagaattttctgtttattgtgacatgtccgatggaggaggatggactgtaattcagagacgatctgatggcagtgaaaactttaacagaggatggaaagactatgaaaatggctttggaaattttgtccaaaaacatggtgaatattggctgggcaataaaaatcttcacttcttgaccactcaagaagactacactttaaaaatcgaccttgcagattttgaaaaaaatagccgttatgcacaatataagaatttcaaagttggagatgaaaagaatttctacgagttgaatattggggaatattctggaacagctggagattcccttgcggggaattttcatcctgaggtgcagtggtgggctagtcaccaaagaatgaaattcagcacgtgggacagagatcatgacaactatgaagggaactgcgcagaagaagatcagtctggctggtggtttaacaggtgtcactctgcaaacctgaatggtgtatactacagcggcccctacacggctaaaacagacaatgggattgtctggtacacctggcatgggtggtggtattctctgaaatctgtggttatgaaaattaggccaaatgattttattccaaatgtaatttaattgctgctgttgggctttcgtttctgcaattcagctttgtttaaagtgatttgaaaaatactcattctgaacatatccatgcgcaatcatgataactgttgtgagtagtgcttttcattcttctcacttgcctttgttacttaatgtgctttcagtacagcagatatgcaatattcaccaaataaatgtagactgtgttaata

SEQ ID NO: 22 - protein, 312 aa, Homo sapiens
MAKVFSFILVTTALTMGREISALEDCAQEQMRLRAQVRLLETRVKQQQVKIKQLLQENEVQFLDKGDENTVIDLGSKRQYADCSEIFNDGYKLSGFYKIKPLQSPAEFSVYCDMSDGGGWTVIQRRSDGSENFNRGWKDYENGFGNFVQKHGEYWLGNKNLHFLTTQEDYTLKIDLADFEKNSRYAQYKNFKVGDEKNFYELNIGEYSGTAGDSLAGNFHPEVQWWASHQRMKFSTWDRDHDNYEGNCAEEDQSGWWFNRCHSANLNGVYYSGPYTAKTDNGIVWYTWHGWWYSLKSVVMKIRPNDFIPNVI

SEQ ID NO: 23 - DNA, 1120 bp, Mus musculus
gttagaagttcctgggaggctctgtgtggatggactgagcctagctaagtcctgattcattttgacttgagttctctcagtgggaagaatgggaaagatttacagcttcgtcctggtcgccattgctctgatgatgggaagggaaggttgggccctcgagagtgagaactgcttgcgggagcaggtgaggctcagggctcaggtgcaccagcttgagacccgggtcaaacaacaacagaccatgattgcacagctcttgcatgagaaggaagtccagtttctggataaaggatcggagaacagtttcattgaccttggaggcaagaagcagtatgcagattgttcagagatttacaatgacggatttaagcagagtggattttacaaaatcaaacctcttcagagcctggcagaattctctgtttattgtgacatgtctgatggagggggatggactgtaattcagagacgatctgatggcagtgagaactttaacaggggttggaatgactatgaaaatggctttggaaactttgtccaaaacaatggcgaatactggctgggtaacaaaaacattaacttgctaactattcaaggagactacactttaaaaatcgacctgacagattttgagaaaaacagcagcttcgcacaataccaaagttttaaagttggtgataaaaagtctttttatgaactaaatattggagaatattctggcacagctggagattccctgtcaggaacttttcatcctgaagtacagtggtgggctagtcaccaaaggatgaagttcagcacgtgggacagagataacgacaattaccaaggaaactgtgctgaggaagagcagtctggctggtggtttaacaggtgtcactctgcaaacctgaacggtgtttactaccgtggttcctacagggcagaaacggataatggtgttgtgtggtacacctggcatgggtggtggtattccttgaaatctgtggttatgaaaattaggccaagtgattttattccaaatattatttagttgccctcattgggatctcctttctgtaattcatcttggtttacttgaaaataaatatttgaaaaagatataattctgaataacaca

SEQ ID NO: 24 - protein, 314 aa, Mus musculus
MGKIYSFVLVAIALMMGREGWALESENCLREQVRLRAQVHQLETRVKQQQTMIAQLLHEKEVQFLDKGSENSFIDLGGKKQYADCSEIYNDGFKQSGFYKIKPLQSLAEFSVYCDMSDGGGWTVIQRRSDGSENFNRGWNDYENGFGNFVQNNGEYWLGNKNINLLTIQGDYTLKIDLTDFEKNSSFAQYQSFKVGDKKSFYELNIGEYSGTAGDSLSGTFHPEVQWWASHQRMKFSTWDRDNDNYQGNCAEEEQSGWWFNRCHSANLNGVYYRGSYRAETDNGVVWYTWHGWWYSLKSVVMKIRPSDFIPNII

SEQ ID NO: 25 - DNA, 2129 bp, Homo sapiens
agagctccaggcgcacatccgcagtcagccacctcgcgcgcgcctccaggagcaaggatggagaggctggtgatcaggatgcccttctctcatctgtctacctacagcctggtttgggtcatggcagcagtggtgctgtgcacagcacaagtgcaagtggtgacccaggatgaaagagagcagctgtacacacctgcttccttaaaatgctctctgcaaaatgcccaggaagccctcattgtgacatggcagaaaaagaaagctgtaagcccagaaaacatggtcaccttcagcgagaaccatggggtggtgatccagcctgcctataaggacaagataaacattacccagctgggactccaaaactcaaccatcaccttctggaatatcaccctggaggatgaagggtgttacatgtgtctcttcaatacctttggttttgggaagatctcaggaacggcctgcctcaccgtctatgtacagcccatagtatcccttcactacaaattctctgaagaccacctaaatatcacttgctctgccactgcccgcccagcccccatggtcttctggaaggtccctcggtcagggattgaaaatagtacagtgactctgtctcacccaaatgggaccacgtctgttaccagcatcctccatatcaaagaccctaagaatcaggtggggaaggaggtgatctgccaggtgctgcacctggggactgtgaccgactttaagcaaaccgtcaacaaaggctattggttttcagttccgctattgctaagcattgtttccctggtaattcttctcgtcctaatctcaatcttactgtactggaaacgtcaccggaatcaggaccgagagccctaaataagtcacacagcaccctgaaagtgattccctggtctacttgaatttgacacaagagaaaagcaggaggaaaaggggccattctccaaaggacctgaaagagcaaaagaggtgggagcgaaagccttaaggatcccacgactttttactgccatctgagctactcagtgtttgaatcccaagaggaagtcagtttacctctcaggtctgttgtaggacttgattttgtaaagcaatgccatgttatgtggttgaaagggcactggacttagttagtatcaggagcactgagctcacagactgacttgggctcctactggtggggacctctgttagtcactttacctcatccaaagtataaaggaattggaccaaataatttaccacatagctctaaaacttaatttaaaatgtaattccagaaaaaaaaagggaataagcaaagggggaagaattgaaagagagagagaagaaagaatacagagagcttaccttttgcctttctgttgatgttacatctcttcttcctatgttcttaggtctatgagtctgtttccccatcatttggtatctagtccagttcctgcttactgctttgctaatagctggccttgctagaatccttggtttcactgctgttcttcatgtgcttctatgagatttactccaacacaaataggactgaatttattgtgaagtaacattggcaatcttaacttattcatttaacttatttttatagctagataaatattgttagtcttagacaatagctcacattttttgagaagcatgccctccctgtccatttgtcttataacatgacccagccctattttacgtcattctaaattcagcctcatataatgaaaatacattatgaaaacagatgtttaggagatttcctgtatagcagtcagccaattcatatgctttgtctctgctggcttctttttccatgcgttaacttttcccaatagcagaggaggcaaatatgagcatacaatccctttgttctaaagatattgttccagctagtggaatgatgttgaatctttaataaccataattagttgctttttcagtatcttctgctttgtctgtgtctatccagtggcctaggaattaaagtgtaagttgttttcgctgttaaattggatatttatatatatatatagcaagattttcatgtgttatttaattctgtattgtttcttatatttgtagtaaaatattgaacaattaaaagtgttgactccaaa

SEQ ID NO: 26 - protein, 269 aa, Homo sapiens
MERLVIRMPFSHLSTYSLVWVMAAVVLCTAQVQVVTQDEREQLYTPASLKCSLQNAQEALIVTWQKKKAVSPENMVTFSENHGVVIQPAYKDKINITQLGLQNSTITFWNITLEDEGCYMCLFNTFGFGKISGTACLTVYVQPIVSLHYKFSEDHLNITCSATARPAPMVFWKVPRSGIENSTVTLSHPNGTTSVTSILHIKDPKNQVGKEVICQVLHLGTVTDFKQTVNKGYWFSVPLLLSIVSLVILLVLISILLYWKRHRNQDREP

SEQ ID NO: 27 - DNA, 2363 bp, Mus musculus
gggcgtggttggttggtcgtctcttcctccacactagaggagctgtagagtctgcctgtgcagtggagggggctctctctacggcgaatagtagtgtccctgctcacaggtgttgcggagatatcctccatcgtggaagagctcagaccccgagaagctggtgtctagctgcggcccagagcaaggatgggcagtctggtattcaggagacctttctgccatctctccacctacagcctgatttggggcatggcagcagtagcgctgagcacagctcaagtggaagtggtgacccaggatgaaagaaaggcgctgcacacaactgcatccttacgatgttctctaaaaacatcccaggaacccttgattgtgacatggcagaaaaagaaagccgtgagcccagaaaacatggtcacctacagcaaaacccatggggttgtaatccagcctgcctacaaagacaggataaatgtcacagagctgggactctggaactcaagcatcaccttctggaacacaacattggaagatgagggctgctacatgtgtctcttcaacacgtttggttctcagaaggtctcaggaacagcttgccttaccctctatgtacagcccatagtacaccttcactacaactattttgaagaccacctaaacatcacttgctctgcgactgcccgtccagcccctgccatctcctggaagggtactgggacaggaattgagaatagtaccgagagtcacttccattcaaatgggactacatctgtcaccagcatcctccgggtcaaagaccccaaaactcaagttgggaaggaagtgatctgccaggttttatacctggggaatgtgattgactacaagcagagtctggacaaaggattttggttttcagttccactgttgctaagcattgtttctctggtaattcttctgatcttgatctccatcttactatactggaaacgtcaccgaaatcaggagcggggtgaatcatcacaggggatgcaaagaatgaaataagagctctaaagaaattatacagaaccctgaacgtgtttccctggtctacttgaatctgatgtgaaagaaaagcaggagggaaaaggccattctccataggacctaaggagagcaaaagaccagacacgagcctgtgagggatttgactttttgctgttgtcccaggtcctcggtgtttgcattccaagaggaagtcgagtgcctcgggtctgttgtaggacttgattttttttttttttgtagagcaatgcagtgccatgctgttagaaaggctccagacttagaaccaccagtgccaagccagctctcagaccgactagggctcccatcggaggaacaaatcgtagtcaacttacctcacagagctctctggtccttacacaaagtagaaaggagtgggaccagaaaattggccatgtctgaaatctgatggaatttttaggaagaaaactgaagaataagcaaaagaagaaagaacacagaagggtccaaagagcttctgagagtaccttttgcctttctgttggtgtcccagctctggttttgttcttaggtccgccagtgtgtttccctgttgtttgagtatctagttgactacctgctactgttctgctgatggttggccttgctagaatccctgactcccctgccgttctctatgtgcttctatgagggttactatgatgaaaatagagcagaagatagtgtgaagtaacattggcaactgtaatgtgtccatttaacttatttttatagcacttaggcaatattgttagtcttagtgagtagttcacatctttacaaaagcatgctctccctatccattgggcccacaataacactctctttgaggccattctgaatcctgtctcgtgtaatgataatatattatgaaaacagatactttaagaatttcctgtacagcagtcagttgtttattctctctctctctctctctctctctctccctcccccaccccagcttctttttctgtgactttgtttttcataaagagaaggcatctcctgaatacaatcgctttgttctgaagacatcgtgaactattaattcttaaccctttgacaaaactagtgaagttgttttctgtatcttttgcttcatctgtctttatagagtgacctaggaattcaagtgtaagttgtttccattgttgaactggatatttatatacttggtatgcttttcacgtgttatttaattctgtataatttcctatatttgtattaaaatattgagcaattaaaagtgtcaactaaatatttgatgtggcattcccttgagaaatatagaaataaagaataaaaaaaaaaaaaaaaaa

SEQ ID NO: 28 - protein, 278 aa, Mus musculus
MGSLVFRRPFCHLSTYSLIWGMAAVALSTAQVEVVTQDERKALHTTASLRCSLKTSQEPLIVTWQKKKAVSPENMVTYSKTHGVVIQPAYKDRINVTELGLWNSSITFWNTTLEDEGCYMCLFNTFGSQKVSGTACLTLYVQPIVHLHYNYFEDHLNITCSATARPAPAISWKGTGTGIENSTESHFHSNGTTSVTSILRVKDPKTQVGKEVICQVLYLGNVIDYKQSLDKGFWFSVPLLLSIVSLVILLILISILLYWKRHRNQERGESSQGMQRMK

SEQ ID NO: 29 - DNA, 1724 bp, Homo sapiens
ctttgttaagtcgttccctctacaaaggacttcctagtgggtgtgaaaggcagcggtggccacagaggcggcggagagatggccttcagcggttcccaggctccctacctgagtccagctgtccccttttctgggactattcaaggaggtctccaggacggacttcagatcactgtcaatgggaccgttctcagctccagtggaaccaggtttgctgtgaactttcagactggcttcagtggaaatgacattgccttccacttcaaccctcggtttgaagatggagggtacgtggtgtgcaacacgaggcagaacggaagctgggggcccgaggagaggaagacacacatgcctttccagaaggggatgccctttgacctctgcttcctggtgcagagctcagatttcaaggtgatggtgaacgggatcctcttcgtgcagtacttccaccgcgtgcccttccaccgtgtggacaccatctccgtcaatggctctgtgcagctgtcctacatcagcttccagaacccccgcacagtccctgttcagcctgccttctccacggtgccgttctcccagcctgtctgtttcccacccaggcccagggggcgcagacaaaaacctcccggcgtgtggcctgccaacccggctcccattacccagacagtcatccacacagtgcagagcgcccctggacagatgttctctactcccgccatcccacctatgatgtacccccaccccgcctatccgatgcctttcatcaccaccattctgggagggctgtacccatccaagtccatcctcctgtcaggcactgtcctgcccagtgctcagaggttccacatcaacctgtgctctgggaaccacatcgccttccacctgaacccccgttttgatgagaatgctgtggtccgcaacacccagatcgacaactcctgggggtctgaggagcgaagtctgccccgaaaaatgcccttcgtccgtggccagagcttctcagtgtggatcttgtgtgaagctcactgcctcaaggtggccgtggatggtcagcacctgtttgaatactaccatcgcctgaggaacctgcccaccatcaacagactggaagtggggggcgacatccagctgacccatgtgcagacataggcggcttcctggccctggggccgggggctggggtgtggggcagtctgggtcctctcatcatccccacttcccaggcccagcctttccaaccctgcctgggatctgggctttaatgcagaggccatgtccttgtctggtcctgcttctggctacagccaccctggaacggagaaggcagctgacggggattgccttcctcagccgcagcagcacctggggctccagctgctggaatcctaccatcccaggaggcaggcacagccagggagaggggaggagtgggcagtgaagatgaagccccatgctcagtcccctcccatcccccacgcagctccaccccagtcccaagccaccagctgtctgctcctggtgggaggtggcctcctcagcccctcctctctgacctttaacctcactctcaccttgcaccgtgcaccaacccttcacccctcctggaaagcaggcctgatggcttcccactggcctccaccacctgaccagagtgttctcttcagaggactggctcctttcccagtgtccttaaaataaagaaatgaaaatgcttgttggcacattca

SEQ ID NO: 30 - protein, 355 aa, Homo sapiens
MAFSGSQAPYLSPAVPFSGTIQGGLQDGLQITVNGTVLSSSGTRFAVNFQTGFSGNDIAFHFNPRFEDGGYVVCNTRQNGSWGPEERKTHMPFQKGMPFDLCFLVQSSDFKVMVNGILFVQYFHRVPFHRVDTISVNGSVQLSYISFQNPRTVPVQPAFSTVPFSQPVCFPPRPRGRRQKPPGVWPANPAPITQTVIHTVQSAPGQMFSTPAIPPMMYPHPAYPMPFITTILGGLYPSKSILLSGTVLPSAQRFHINLCSGNHIAFHLNPRFDENAVVRNTQIDNSWGSEERSLPRKMPFVRGQSFSVWILCEAHCLKVAVDGQHLFEYYHRLRNLPTINRLEVGGDIQLTHVQT

SEQ ID NO: 31 - DNA, 1586 bp, Mus musculus
gccaaatagctgtggtttctgtttcctagctcagccctgccctgcgcagagttctgtcgtccaccatcgagtgaggaagagagcattggttcccctgagatagaagagatggctctcttcagtgcccagtctccatacattaacccgatcatcccctttactggaccaatccaaggagggctgcaggagggacttcaggtgaccctccaggggactaccaagagttttgcacaaaggtttgtggtgaactttcagaacagcttcaatggaaatgacattgccttccacttcaacccccggtttgaggaaggagggtatgtggtttgcaacacgaagcagaacggacagtggggtcctgaggagagaaagatgcagatgcccttccagaaggggatgccctttgagctttgcttcctggtgcagaggtcagagttcaaggtgatggtgaacaagaaattctttgtgcagtaccaacaccgcgtaccctaccacctcgtggacaccatcgctgtctccggctgcttgaagctgtcctttatcaccttccagaactctgcagcccctgtccagcatgtcttctccacagtgcagttctctcagccagtccagttcccacggacccctaaggggcgcaaacagaaaactcagaactttcgtcctgcccaccaggcacccatggctcaaactaccatccatatggttcacagcacccctggacagatgttctctactcctggaatccctcctgtggtgtaccccaccccagcctataccatacctttctacacccccattccaaatgggctttacccgtccaagtccatcatgatatcaggcaatgtcttgccagatgctacgaggttccatatcaaccttcgctgtggaggtgacattgctttccacctgaacccccgtttcaatgagaatgctgttgtccgaaacactcagatcaacaactcctgggggcaggaagagcgaagtctgcttgggaggatgcccttcagtcgaggccagagcttctcggtgtggatcatatgtgaaggtcactgcttcaaggtagctgtgaatggtcaacacatgtgtgaatattaccaccgcctgaagaacttgcaggatatcaacactctagaagtggcgggtgatatccagctgacccacgtgcagacataggcaaggtctctggcctagggataagggctggagcactctgcctgtgtcttatctttcccctgtctcagccctggcaccatcagaagagatcatcacttataggaattccaggaaggtgaaattcccaattgactccctccacaaagggggttttctaggctgtgtggcacatggctgtcagcccatagtctgagccattgcccccaagctagctatatactgagggaagtgaccctcctgggtttgctcagatctctgatcgttcccccctctgtggcccttttctttcacccctccaggagagccaccctgatatcatcccactggcctccaactgacccacaatgtccacagtaactttcccccattctcacccagtatccataaaataaagaaataatattgcttgtctacac

SEQ ID NO: 32 - protein, 353 aa, Mus musculus
MALFSAQSPYINPIIPFTGPIQGGLQEGLQVTLQGTTKSFAQRFVVNFQNSFNGNDIAFHFNPRFEEGGYVVCNTKQNGQWGPEERKMQMPFQKGMPFELCFLVQRSEFKVMVNKKFFVQYQHRVPYHLVDTIAVSGCLKLSFITFQNSAAPVQHVFSTVQFSQPVQFPRTPKGRKQKTQNFRPAHQAPMAQTTIHMVHSTPGQMFSTPGIPPVVYPTPAYTIPFYTPIPNGLYPSKSIMISGNVLPDATRFHINLRCGGDIAFHLNPRFNENAVVRNTQINNSWGQEERSLLGRMPFSRGQSFSVWIICEGHCFKVAVNGQHMCEYYHRLKNLQDINTLEVAGDIQLTHVQT

SEQ ID NO: 33 - DNA, 5792 bp, Homo sapiens
agtcacttgtctggagcttgaagaagtgggtattccccttcccaccccaggcactggaggagcggccccccggggattccaggacctgagctccgggagctggactcgcagcgaccgcggcagagcgagcgggcgccgggaagcgaggagacgcccgcgggaggcccagctgctcggagcaactggcatggcccgagccatggccgccgcgtggccgctgctgctggtggcgctactggtgctgtcctggccacccccaggaaccggggacgtcgtcgtgcaggcgcccacccaggtgcccggcttcttgggcgactccgtgacgctgccctgctacctacaggtgcccaacatggaggtgacgcatgtgtcacagctgacttgggcgcggcatggtgaatctggcagcatggccgtcttccaccaaacgcagggccccagctattcggagtccaaacggctggaattcgtggcagccagactgggcgcggagctgcggaatgcctcgctgaggatgttcgggttgcgcgtagaggatgaaggcaactacacctgcctgttcgtcacgttcccgcagggcagcaggagcgtggatatctggctccgagtgcttgccaagccccagaacacagctgaggttcagaaggtccagctcactggagagccagtgcccatggcccgctgcgtctccacagggggtcgcccgccagcccaaatcacctggcactcagacctgggcgggatgcccaatacgagccaggtgccagggttcctgtctggcacagtcactgtcaccagcctctggatattggtgccctcaagccaggtggacggcaagaatgtgacctgcaaggtggagcacgagagctttgagaagcctcagctgctgactgtgaacctcaccgtgtactaccccccagaggtatccatctctggctatgataacaactggtaccttggccagaatgaggccaccctgacctgcgatgctcgcagcaacccagagcccacaggctataattggagcacgaccatgggtcccctgccaccctttgctgtggcccagggcgcccagctcctgatccgtcctgtggacaaaccaatcaacacaactttaatctgcaacgtcaccaatgccctaggagctcgccaggcagaactgaccgtccaggtcaaagagggacctcccagtgagcactcaggcatgtcccgtaacgccatcatcttcctggttctgggaatcctggtttttctgatcctgctggggatcgggatttatttctattggtccaaatgttcccgtgaggtcctttggcactgtcatctgtgtccctcgagtacagagcatgccagcgcctcagctaatgggcatgtctcctattcagctgtgagcagagagaacagctcttcccaggatccacagacagagggcacaaggtgacagcgtcgggactgagaggggagagagactggagctggcaaggacgtgggcctccagagttggacccgaccccaatggatgaagaccccctccaaagagaccagcctccctccctgtgccagacctcaaaacgacgggggcaggtgcaagttcataggtctccaagaccaccctcctttcatttgctagaaggactcactagactcaggaaagctgttaggctcacagttacagtttattacagtaaaaggacagagattaagatcagcaaagggaggaggtgcacagcacacgttccacgacagatgaggcgacggcttccatctgccctctcccagtggagccatataggcagcacctgattctcacagcaacatgtgacaacatgcaagaagtactgccaatactgccaaccagagcagctcactcgagatctttgtgtccagagttttttgtttgtcttgagacagggtctggctctgttggcagactagagtacagtggtgagatcacagttcattgcagccttgacttctcaacgccaagtcatcctcccacctcagcctcctgagtagctatgactacaggtatgtgccaccacgtctggctaatctttttattatttgtaaagtcgaggtttccctgtgttgcccaggctggtcttgaactcttggctccaagtgatacttctgccttggcctcccaaagtgctgaattaagcagctcaccatccacacggctgacctcatacatcaagccaataccgtgtggcccaagacccccaccataaatcacatcattagcatgaaccacccagagtggcccaagactccaagatcagctaccaggcaggatattccaagggcttagagatgaatgcccaggagctgaggataaagggcccgatctttctttgggcaaggttaagcctttactgcatagcagaccacacagaagggtgtgggccaccagagaattttggtaaaaatttggcctctggccttgagcttctaaatctctgtatccgtcagatctctgtggttacaagaaacagccactgaccctggtcaccagaggctgcaattcaggccgcaagcagctgcctggggggtgtccaaggagcagagaaaactactagatgtgaacttgaagaaggttgtcagctgcagccactttctgccagcatctgcagccactttctgccagcatctgcagccagcaagctgggactggcaggaaataacccacaaaagaagcaaatgcaatttccaacacaagggggaagggatgcagggggaggcagcgctgcagttgctcaggacacgctcctataggaccaagatggatgcgacccaagacccaggaggcccagctgctcagtgcaactgacaagttaaaaaggtctatgatcttgagggcagacagcagaattcctcttataaagaaaactgtttgggaaaatacgttgagggagagaagaccttgggccaagatgctaaatgggaatgcaaagcttgagctgctctgcaagagaaaataagcaggacagaggatttgctctggacagagatggaagagccgggaacagagaagtgtggggaagagataggaaccagcaggatggcaggggcaaagggctcaagggtgaggaggccagtgggaccccacagagttggggagataaaggaacattggttgctttggtggcacgtaagctccttgtctgtctccagcacccagaatctcattaaagcttatttattgtacctccagcggctgtgtgcaatggggtcttttgtggaaatcaaggagcagacaggtttcatgtgtactgtcaccacgtgggatggaaccagaggcatggaagcaagacgctaaatgaagagggccataagggctgggattcccaggcaccttaggaacagcttgtctttttttttttcctctccaaaaaaaatgtttaagggacggtgtctcctgtcacccaggctggagtgcaatggcacgatcatagctcattgcagcctctaactccggggctcaagcaatcctcccacctcagcctaccaagtagctgtgaccacagctgcccctcaccatgctaagctaatttttttaattagatagtacataaacgtcccaaaattagaagataaaaagacatgagggatccattctaatttgtgtttggagtgtaatggtccagctccattcttctgcacatggatatccagttttacacaacactgtgaatgtaatgaatgccactgaatcatacactcaaaaatagctaaaatggcaaattgtctgttatctctttttaaccaccatttttgaaaattaattataccaaaaaaccattgaatagtgcactttatttatttatttatttgtttatttatttatttattttagaaataagagtctcactttgttgcccaggctggagtgcagtggcgtgatcatggctcattgcagcctcgacctgctgggctcgggctatccttccatctcagcctcccgagtagctgggactataggtgggcgccaccccacctggctaaatctctttttaacttttgtagagataggcatctcgctatgttgcctaggctgggctggaactcctgggctcaagtgctcctcctgccttggcctcccaaagcgctaggattacagatgtgagccaccgcgcccaccctgaaccttactttttttgctcagtttctggtaattcagagaatgcctcctgagttgttctacacccacctcatattccatgggagggctgtacagggcttttttaacgaggcctctaaggacaggcatttgtatcctttccagcctttcactattacaatgttgtagtgaataactttacacactgtcatttattttacttttttttttttttattttagagaaaggaatcttgccatcttgcccaggctggtctcaaattcctgggcccaaacaatcctcccgccttggcctcctaaagtactgggatttataggcataagccaccgtgcctggccaatgcacactgtcatttagctcatgttaacacctgagtgtaggacacactcctggaggtggaattgctgggccaaagagtatgtttcttgtcattgtgatagatattgacaaatgaaccctcacagaagttgtgctgagttctgttcccaccagcgacgtaggcgatgacctttttctggagggagggggcatccttggagtccacagagccaggaatggagagtgggcccagaattttggtataggtgttgtataaacttatagtaaggttaagaaaaccgcaactatccttatcagagacttggcggggggcagggtatgatggagatcataaggaggctaaaacactccacaccctccctctgcattgctcctgcacgggagtcgggaatcttttcaggttgatacgatctcaccttgaggagctgtgaggtcccagaagcctctgggttgcagattgcttggggtgaaaatgtctgtgctactgaaatctaactttttacaaaaaattacgggctgggcgcagtggctcacgcctgtaatcccagcactttgggaggctgcagcgggtggatcacttgaggtaaggagttcaagaccagaccatagtgaaaccgtgtctctacaaaaaaaattagccaggtgtggtggtgcatgcttgtaatcccagctactcagaaggctgaggtgggagaatcccttgaacccgggaagtggaggctggagtaaaccatgatcgagttactgcactccagcctgggtgacaagagtgagactctgtctccaaaaaaaaaaaaaaaaaaaaaaaaactggattgcctggctctactccgggcacagcatgcaggcccagttctgctgctctgctgtttgttctgctttcctccacatattggcatcaccctctggtgccaagatggctgctgcattccaggcatcacatccagactcagacccagagaagctgcccatccctacctgggtgagcctttgtaggaacgagaaaccgcatccagcagcagaaacctcacccagcagcgtcttttccggtctcattcaccagcgccgcccaccgctcaaccaatccctggccaaaagaatgggaccgcctggaaggctggaccaaacaggacctgccctctggggctggggagaggcccagatgaaggctgcaggacaggatggactcctagacctctgttaccagcagtgactacctctgtctgggtggttggaacatgtttgaattttattctaagtactgtctacaagttctgcaataaaccttgactcttcttttaataatgcaaaa

SEQ ID NO: 34 - protein, 417 aa, Homo sapiens
MARAMAAAWPLLLVALLVLSWPPPGTGDVVVQAPTQVPGFLGDSVTLPCYLQVPNMEVTHVSQLTWARHGESGSMAVFHQTQGPSYSESKRLEFVAARLGAELRNASLRMFGLRVEDEGNYTCLFVTFPQGSRSVDIWLRVLAKPQNTAEVQKVQLTGEPVPMARCVSTGGRPPAQITWHSDLGGMPNTSQVPGFLSGTVTVTSLWILVPSSQVDGKNVTCKVEHESFEKPQLLTVNLTVYYPPEVSISGYDNNWYLGQNEATLTCDARSNPEPTGYNWSTTMGPLPPFAVAQGAQLLIRPVDKPINTTLICNVTNALGARQAELTVQVKEGPPSEHSGMSRNAIIFLVLGILVFLILLGIGIYFYWSKCSREVLWHCHLCPSSTEHASASANGHVSYSAVSRENSSSQDPQTEGTR

SEQ ID NO: 35 - DNA, 2902 bp, Mus musculus
aggcggcacccgcttagctgagattccagcacttgacttcagggtttcggagagataaggcgcttggccgttactaactggactacaaagagctggatcggaccggaaccacatggctcaactcgcccgagccacccgctccccgctgtcatggctgctgctgctgttctgctatgcactccggaaagcgggtggggatatacgtgtgctggtgccctacaattcgacaggcgtcttgggagggtcgaccaccttgcactgtagtctgacttctaatgagaatgtgactatcactcaaataacctggatgaagaaggattcaggtggatcccacgctcttgtggctgtcttccaccccaagaaggggcccaacatcaaagagccagagagggtgaaattcttggctgcccaacaggatctgaggaacgcatctctggccatctcgaacttaagtgtagaagacgaaggcatctatgaatgtcagattgccacattccccagaggcagtagaagcaccaatgcctggctgaaggtgcaagcccgacctaagaacactgcagaggccctggagccctctcccaccttgatactgcaggatgtggctaaatgcatctctgccaatggtcaccctcctggacgaatctcttggccctcgaatgtgaatggaagtcaccgtgaaatgaaggaaccagggtcccagccgggcaccaccacagttaccagctacctctccatggtaccttctcgccaggcagacggcaagaacatcacctgcacggtggagcatgaaagcttacaggagctggaccagctgctggtgaccctttcccaaccctatccacctgaaaacgtgtccatctctggctatgacggcaactggtatgttggcctcactaacttgaccctgacctgtgaagctcacagcaaaccagcgcctgacatggctggatataactggagcacgaacacgggtgactttcccaactctgttaagcgccagggcaatatgcttctaatctccaccgtagaggatggtctcaataacacggtcattgtgtgcgaagtcaccaatgccctagggtctgggcagggccaagtgcacatcattgttaaagagaaacctgagaatatgcagcaaaatacaagattacacctaggctacatctttcttatcgtctttgtcctcgctgtagtcatcatcatcgcagcactatacactatacgaagatgcaggcatggtcgtgctctgcagtccaatccctcagagagggagaacgtccagtattcatctgtgaacggcgactgtagactgaacatggagccaaacagcacaaggtgacggtgctgggtagacagaactaaggaacttgaaggcatagcaactggaaccctactctcataaatgaagaagcctccagagagactggctgctcagtgtgatgagcatagcaagtttggggggtctcccaggatgctgccgaattccacgttgtcaaaaggacccatggaggccagtgtgttggctcactcttgacatctcagcaagctgggggggggggggggagcataaagcaaggttgagtctagcttgggctatagagcaaagccctgtccatacacaaacaagctaaggggctttgagacggtcagaaactgaagtcttgctttgggtaaggtaaatcctctaccgcatgtatgtgctagacttgaaagacttccacacagacctctttataagttgactccattggggctatcccctcctctctggacaaggtctctgtatgtagccaaggctaggctcaaactcacagagatatgtctgcttctacctccccagtgctagagttgaaagtatttgtgccactgcacttttctaggtcttcttttaatgaagtaaagtatatatttataaaaagctatttagttatatatatatatatttttgagactatttcatagagcccaagctaacctcaaacttactatgtagccaagagtgatggtaaactaatttattttaatttatttgtcttcaattttaaccatcacccaacccctgctcccttccatatcttctttcaatccatttcattgtctttttcttcccagacactattctgacttacgtctccattacaaacattttattgaactacataaaaatgtgtgaaccacaaaaaaaaaatgtatttgtcaaaattgtagttgtctttctgaggctgacctgagttctctgataccattctctccagttgtatccagtttcctgtaaacaatgtgactttgtttttctcagtagctaaaacatcccaattatgtgagtgtacactttctttactcattcctctgtgggccaccagctgggttggttccatatctgagctattgtgcatggaattgtctctgtggtgggtttagtaaactcccaggaatgcctgtacatgtttgtagaggccagaagaaggcacaaaatcttgagccaggcttacatgcacttgtgagtagccccacataggtgctaagaacccagttcaggtcctctgctgtgggatggtgggctgtgcacagaaagcctggtcccggtctagcaaaggtctggaactccggagccggtgggctgtgatttacaccagcatgggatggaaggagttggacctcgcctcctgggcacctggctcctgtcacatagctacagcctcccacagcccccctatagggaggtatgcagcatcaatcacatagtagctgcactaagccctcccacatgcaaataaggtttccccaaactctcagtccaagccaatgaaaagtacctgctgtcaaaccctaaatcatccccaaaactctgtaagtcctatcagggaataaaatgtgtgtgaaaactaaaaaaaaaaaaaaa

SEQ ID NO: 36 - protein, 408 aa, Mus musculus
MAQLARATRSPLSWLLLLFCYALRKAGGDIRVLVPYNSTGVLGGSTTLHCSLTSNENVTITQITWMKKDSGGSHALVAVFHPKKGPNIKEPERVKFLAAQQDLRNASLAISNLSVEDEGIYECQIATFPRGSRSTNAWLKVQARPKNTAEALEPSPTLILQDVAKCISANGHPPGRISWPSNVNGSHREMKEPGSQPGTTTVTSYLSMVPSRQADGKNITCTVEHESLQELDQLLVTLSQPYPPENVSISGYDGNWYVGLTNLTLTCEAHSKPAPDMAGYNWSTNTGDFPNSVKRQGNMLLISTVEDGLNNTVIVCEVTNALGSGQGQVHIIVKEKPENMQQNTRLHLGYIFLIVFVLAVVIIIAALYTIRRCRHGRALQSNPSERENVQYSSVNGDCRLNMEPNSTR

SEQ ID NO: 37 - DNA, 1987 bp, Homo sapiens
gtgacgtcagcgggttcgaaccgccggagctgagcgagaggccgggggtgccgagccgggcggggagagctgggccgggagagcagaacagggaggctagagcgcagcgggaaccggcccggagccggagccggagccccacaggcacctactaaaccgcccagccgatcggcccccacagagtggcccgcgggcctccggccgggcccagtcccctcccgggccctccatggcccgggccgctgccctcctgccgtcgagatcgccgccgacgccgctgctgtggccgctgctgctgctgctgctcctggaaaccggagcccaggatgtgcgagttcaagtgctacccgaggtgcgaggccagctcgggggcaccgtggagctgccgtgccacctgctgccacctgttcctggactgtacatctccctggtgacctggcagcgcccagatgcacctgcgaaccaccagaatgtggccgccttccaccctaagatgggtcccagcttccccagcccgaagcctggcagcgagcggctgtccttcgtctctgccaagcagagcactgggcaagacacagaggcagagctccaggacgccacgctggccctccacgggctcacggtggaggacgagggcaactacacttgcgagtttgccaccttccccaaggggtccgtccgagggatgacctggctcagagtcatagccaagcccaagaaccaagctgaggcccagaaggtcacgttcagccaggaccctacgacagtggccctctgcatctccaaagagggccgcccacctgcccggatctcctggctctcatccctggactgggaagccaaagagactcaggtgtcagggaccctggccggaactgtcactgtcaccagccgcttcaccttggtgccctcgggccgagcagatggtgtcacggtcacctgcaaagtggagcatgagagcttcgaggaaccagccctgatacctgtgaccctctctgtacgctaccctcctgaagtgtccatctccggctatgatgacaactggtacctcggccgtactgatgccaccctgagctgtgacgtccgcagcaacccagagcccacgggctatgactggagcacgacctcaggcaccttcccgacctccgcagtggcccagggctcccagctggtcatccacgcagtggacagtctgttcaataccaccttcgtctgcacagtcaccaatgccgtgggcatgggccgcgctgagcaggtcatctttgtccgagaaacccccagggcctcgccccgagatgtgggcccgctggtgtggggggccgtgggggggacactgctggtgctgctgcttctggctggggggtccttggccttcatcctgctgagggtgaggaggaggaggaagagccctggaggagcaggaggaggagccagtggcgacgggggattctacgatccgaaagctcaggtgttgggaaatggggaccccgtcttctggacaccagtagtccctggtcccatggaaccagatggcaaggatgaggaggaggaggaggaggaagagaaggcagagaaaggcctcatgttgcctccacccccagcactcgaggatgacatggagtcccagctggacggctccctcatctcacggcgggcagtttatgtgtgacctggacacagacagagacagagccaggcccggccctcccgcccccgacctgaccacgccggcctagggttccagactggttggacttgttcgtctggacgacactggagtggaacactgcctcccactttcttgggacttggagggaggtggaacagcacactggacttctcccgtctctagggctgcatggggagcccggggagctgagtagtggggatccagagaggacccccgcccccagagacttggttttggctccagccttcccctggccccgtgacactcaggagttaataaatgccttggaggaaaaca

SEQ ID NO: 38 - protein, 479 aa, Homo sapiens
MARAAALLPSRSPPTPLLWPLLLLLLLETGAQDVRVQVLPEVRGQLGGTVELPCHLLPPVPGLYISLVTWQRPDAPANHQNVAAFHPKMGPSFPSPKPGSERLSFVSAKQSTGQDTEAELQDATLALHGLTVEDEGNYTCEFATFPKGSVRGMTWLRVIAKPKNQAEAQKVTFSQDPTTVALCISKEGRPPARISWLSSLDWEAKETQVSGTLAGTVTVTSRFTLVPSGRADGVTVTCKVEHESFEEPALIPVTLSVRYPPEVSISGYDDNWYLGRTDATLSCDVRSNPEPTGYDWSTTSGTFPTSAVAQGSQLVIHAVDSLFNTTFVCTVTNAVGMGRAEQVIFVRETPRASPRDVGPLVWGAVGGTLLVLLLLAGGSLAFILLRVRRRRKSPGGAGGGASGDGGFYDPKAQVLGNGDPVFWTPVVPGPMEPDGKDEEEEEEEEKAEKGLMLPPPPALEDDMESQLDGSLISRRAVYV

SEQ ID NO: 39 - DNA, 2009 bp, Mus musculus
gagccctaggatcggcttggcgaagaggggcggggcctgtgacgtcatgagtccggcccgctggagctaagcgaggggccggggggcgcggatcctgagagccaggcgagggaaagctgggccgaacgaactgatccggggagccgtgagcggcggaagccggcctggagccggacacttcagacccctgactgccctcccagccgatcggtacacgaagagtggtccctaggcaccccctgcccgggcccagtccctccccgggccccccatggcccgggccgcagtcctcccgccgtccagattgtcaccgacgctgccgttgttgccgctgctactgctcctgcttcaggaaacaggagcccaagatgtgcgggtacgagtgcttcccgaggtccggggccgcttgggaggcaccgtggagttaccgtgccacctgctcccacccacgacggagcgcgtctctcaggtgacctggcagcgcctggatggcacagttgtggctgctttccacccatccttcggagtggatttccccaactctcagttcagcaaggaccgtctgtcctttgtcagagcgagaccagaaacaaacgcagacctgcgggatgccacactggccttccggggactgagggtagaggacgagggcaattacacctgcgagtttgccacgtttcccaacggtacccgcaggggggtgacctggctcagagtcatagcccagcctgagaaccacgctgaagcccaggaggtcacaattggcccccagtcggtggctgtagcccgctgtgtctccactgggggccgcccccctgcccgaatcacctggatctcatctctgggtggagaggccaaagatactcaggagccagggatacaggctggcaccgtcactatcatcagccgatactccttggtgcccgtgggccgagcggatggcgtcaaggtcacgtgtagagtggaacacgagagcttcgaagagccgatcctgctgccagtgaccctctctgtgcgctaccctccagaagtatccatctccggctatgatgacaactggtaccttggccgcagtgaggccatactgacctgtgatgtacgaagcaacccagagcccacagactatgactggagcacgacctcgggcgtcttcccagcctctgcagtggcccagggctctcagctgcttgtccactctgtggatcgaatggtcaacactaccttcatctgtacagccaccaacgctgtggggacaggccgtgctgagcaggtcatcctggtgcgagacaccccccaggcctcccgagatgtgggtccgctggtgtggggggccgtggggggaacattgctggtgctactcctggctggggggttcctggccttgatcctgctgagggggaggaggaggcggaagagccctggaggaggaggaaatgatggcgacagaggatcctacgatccaaagactcaggtgtttgggaacgggggtcctgtcttctggaggtcagcatcccctgagcccatgaggccagatggcagggaggaagatgaggaggaggaggaagaaatgaaggcagaggaaggtctcatgctacctccacacgagtcacctaaggacgacatggagtcccatctggatggctccctcatctctcggcgggcagtttacgtgtgaccctacgatatagacactggacacatggaaacaccaagttccaccctcactgccaaccacaccaatgccagccagcaacgatggctagggaccggttggactggttcttctggggcacactggagttggaagggcaccgcccctgctttcaggatagaggacaagtggaaccacacagactcctatctttagggcctcatggagtaggggaccccaggagcgccatggtgcacactcaggactcctcagagcttgctttcggccccagcctagccctggccccgaaacactcaggagctaataaatgccttgtcggaaaaaaaaaaaaaaaaaa

SEQ ID NO: 40 - protein, 467 aa, Mus musculus
MARAAVLPPSRLSPTLPLLPLLLLLLQETGAQDVRVRVLPEVRGRLGGTVELPCHLLPPTTERVSQVTWQRLDGTVVAAFHPSFGVDFPNSQFSKDRLSFVRARPETNADLRDATLAFRGLRVEDEGNYTCEFATFPNGTRRGVTWLRVIAQPENHAEAQEVTIGPQSVAVARCVSTGGRPPARITWISSLGGEAKDTQEPGIQAGTVTIISRYSLVPVGRADGVKVTCRVEHESFEEPILLPVTLSVRYPPEVSISGYDDNWYLGRSEAILTCDVRSNPEPTDYDWSTTSGVFPASAVAQGSQLLVHSVDRMVNTTFICTATNAVGTGRAEQVILVRDTPQASRDVGPLVWGAVGGTLLVLLLAGGFLALILLRGRRRRKSPGGGGNDGDRGSYDPKTQVFGNGGPVFWRSASPEPMRPDGREEDEEEEEEMKAEEGLMLPPHESPKDDMESHLDGSLISRRAVYV

SEQ ID NO: 41 - DNA, 2690 bp, Homo sapiens
gtgacgtcagcgggttcgaaccgccggagctgagcgagaggccgggggtgccgagccgggcggggagagctgggccgggagagcagaacagggaggctagagcgcagcgggaaccggcccggagccggagccggagccccacaggcacctactaaaccgcccagccgatcggcccccacagagtggcccgcgggcctccggccgggcccagtcccctcccgggccctccatggcccgggccgctgccctcctgccgtcgagatcgccgccgacgccgctgctgtggccgctgctgctgctgctgctcctggaaaccggagcccaggatgtgcgagttcaagtgctacccgaggtgcgaggccagctcgggggcaccgtggagctgccgtgccacctgctgccacctgttcctggactgtacatctccctggtgacctggcagcgcccagatgcacctgcgaaccaccagaatgtggccgccttccaccctaagatgggtcccagcttccccagcccgaagcctggcagcgagcggctgtccttcgtctctgccaagcagagcactgggcaagacacagaggcagagctccaggacgccacgctggccctccacgggctcacggtggaggacgagggcaactacacttgcgagtttgccaccttccccaaggggtccgtccgagggatgacctggctcagagtcatagccaagcccaagaaccaagctgaggcccagaaggtcacgttcagccaggaccctacgacagtggccctctgcatctccaaagagggccgcccacctgcccggatctcctggctctcatccctggactgggaagccaaagagactcaggtgtcagggaccctggccggaactgtcactgtcaccagccgcttcaccttggtgccctcgggccgagcagatggtgtcacggtcacctgcaaagtggagcatgagagcttcgaggaaccagccctgatacctgtgaccctctctgtacgctaccctcctgaagtgtccatctccggctatgatgacaactggtacctcggccgtactgatgccaccctgagctgtgacgtccgcagcaacccagagcccacgggctatgactggagcacgacctcaggcaccttcccgacctccgcagtggcccagggctcccagctggtcatccacgcagtggacagtctgttcaataccaccttcgtctgcacagtcaccaatgccgtgggcatgggccgcgctgagcaggtcatctttgtccgagagacccccaacacagcaggcgcaggggccacaggcggcatcatcgggggcatcatcgccgccatcattgctactgctgtggctgccacgggcatccttatctgccggcagcagcggaaggagcagacgctgcagggggcagaggaggacgaagacctggagggacctccctcctacaagccaccgaccccaaaagcgaagctggaggcacaggagatgccctcccagctcttcactctgggggcctcggagcacagcccactcaagaccccctactttgatgctggcgcctcatgcactgagcaggaaatgcctcgataccatgagctgcccaccttggaagaacggtcaggacccttgcaccctggagccacaagcctggggtcccccatcccggtgcctccagggccacctgctgtggaagacgtttccctggatctagaggatgaggagggggaggaggaggaagagtatctggacaagatcaaccccatctatgatgctctgtcctatagcagcccctctgattcctaccagggcaaaggctttgtcatgtcccgggccatgtatgtgtgagctgccatgcgcctggcgtctcacatctcacctgttgatcccttagctttcttgccaaggatctagtgccccctgacctctggccaggccactgtcagttaacacatatgcattccatttgtgatgtctaccttggtggctccactatgacccctaacccatgagcccagagaaattcaccgtgataatggaatcctggcaaccttatctcatgaggcaggaggtggggaaggtgcttctgcacaacctctgatcccaaggactcctctcccagactgtgaccttagaccatacctctcaccccccaatgcctcgactcccccaaaatcacaaagaagaccctagacctataatttgtcttcaggtagtaaattcccaataggtctgctggagtgggcgctgagggctccctgctgctcagacctgagccctccaggcagcagggtcccacttaccccctccccaccctgttccccaaaggtgggaaagaggggattccccagcccaaggcagggttttcccagcaccctcctgtaagcagaagtctcagggtccagacccttccctgagcccccacccccaccccaattcctgcctaccaagcaagcagccccagcctagggtcagacagggtgagcctcatacagactgtgccttgatggccccagccttgggagaagaatttactgttaacctggaagactactgaatcattttacccttgcccagtggaataggacctaaacatcccccttccggggaaagtgggtcatctgaattgggggtagcaattgatactgttttgtaaactacatttcctacaaaatatgaatttatactttga

SEQ ID NO: 42 - protein, 538 aa, Homo sapiens
MARAAALLPSRSPPTPLLWPLLLLLLLETGAQDVRVQVLPEVRGQLGGTVELPCHLLPPVPGLYISLVTWQRPDAPANHQNVAAFHPKMGPSFPSPKPGSERLSFVSAKQSTGQDTEAELQDATLALHGLTVEDEGNYTCEFATFPKGSVRGMTWLRVIAKPKNQAEAQKVTFSQDPTTVALCISKEGRPPARISWLSSLDWEAKETQVSGTLAGTVTVTSRFTLVPSGRADGVTVTCKVEHESFEEPALIPVTLSVRYPPEVSISGYDDNWYLGRTDATLSCDVRSNPEPTGYDWSTTSGTFPTSAVAQGSQLVIHAVDSLFNTTFVCTVTNAVGMGRAEQVIFVRETPNTAGAGATGGIIGGIIAAIIATAVAATGILICRQQRKEQTLQGAEEDEDLEGPPSYKPPTPKAKLEAQEMPSQLFTLGASEHSPLKTPYFDAGASCTEQEMPRYHELPTLEERSGPLHPGATSLGSPIPVPPGPPAVEDVSLDLEDEEGEEEEEYLDKINPIYDALSYSSPSDSYQGKGFVMSRAMYV

SEQ ID NO: 43 - DNA, 2735 bp, Mus musculus
gagccctaggatcggcttggcgaagaggggcggggcctgtgacgtcatgagtccggcccgctggagctaagcgaggggccggggggcgcggatcctgagagccaggcgagggaaagctgggccgaacgaactgatccggggagccgtgagcggcggaagccggcctggagccggacacttcagacccctgactgccctcccagccgatcggtacacgaagagtggtccctaggcaccccctgcccgggcccagtccctccccgggccccccatggcccgggccgcagtcctcccgccgtccagattgtcaccgacgctgccgttgttgccgctgctactgctcctgcttcaggaaacaggagcccaagatgtgcgggtacgagtgcttcccgaggtccggggccgcttgggaggcaccgtggagttaccgtgccacctgctcccacccacgacggagcgcgtctctcaggtgacctggcagcgcctggatggcacagttgtggctgctttccacccatccttcggagtggatttccccaactctcagttcagcaaggaccgtctgtcctttgtcagagcgagaccagaaacaaacgcagacctgcgggatgccacactggccttccggggactgagggtagaggacgagggcaattacacctgcgagtttgccacgtttcccaacggtacccgcaggggggtgacctggctcagagtcatagcccagcctgagaaccacgctgaagcccaggaggtcacaattggcccccagtcggtggctgtagcccgctgtgtctccactgggggccgcccccctgcccgaatcacctggatctcatctctgggtggagaggccaaagatactcaggagccagggatacaggctggcaccgtcactatcatcagccgatactccttggtgcccgtgggccgagcggatggcgtcaaggtcacgtgtagagtggaacacgagagcttcgaagagccgatcctgctgccagtgaccctctctgtgcgctaccctccagaagtatccatctccggctatgatgacaactggtaccttggccgcagtgaggccatactgacctgtgatgtacgaagcaacccagagcccacagactatgactggagcacgacctcgggcgtcttcccagcctctgcagtggcccagggctctcagctgcttgtccactctgtggatcgaatggtcaacactaccttcatctgtacagccaccaacgctgtggggacaggccgtgctgagcaggtcatcctggtgcgagagtcacccagcacagcaggagcaggggccactggtggcatcattggaggtattatcgctgccatcatcgccaccgcagtggctggcacaggcatcctcatctgccgacaacagcggaaggagcagaggcttcaagctgcggatgaggaagaagaactggaaggacctccctcctataaaccacccaccccgaaggccaagctggaggaaccagagatgccctctcaactcttcaccttgggggcctcagagcacagcccagtgaagacgccatactttgatgctggtgtctcttgtgctgatcaggagatgcctcggtatcacgagctgcccactctggaagagcggtcagggcccctgctgttgggggctacaggcctgggaccttctcttctggtgcctccaggacccaatgttgtggagggggtttccctgagtctcgaagatgaggaggaagatgatgaggaggaagacttcctggataaaatcaaccctatttatgatgccctgtcctaccccagcccctctgactcctaccagagcaaagacttttttgtgtcacgggccatgtatgtgtgagggaggcacaggggctctgacgtctcacctttcacccttgacccatgagctttccaccagtaatctaggacactctgacttccaggcagaccagggacaactatcacccattgcaatccacctgtgacttcttagtgactccaccatgacgtccaatctatgatgtctgaggcaggcaaacctgcacaactggaaacctggagatttttatctcccttggcagggagctcaccatatccttctgcaccacctgtgaccccccccccccccccaaggactcctaagactacgaccctttgaccatgccactcagtatctcaagaacccttaaagtcccaaaggaatcggaccttgcacttgtcctcaggcaatagagtccaacagatatgcaagaacgggatcaggggctccctgttgctcagacctgagccctccaggcagcagaagctcacctgatccctccccaccctgctccccaaaggtgaaaaggagaggattccccaatgtaaggtaggacctccccatctccacctactcctgcaggcaggaatctcaggtttctcacaccctctcctcagcacccaggttcctgtctccagagcatgaattccaggtccaatgctagaggggagaacctaatgcaagtgtgccttgccaccccaagtttgggagactctgctcttatcctgaggactactgaattcttttaacccctacccagtgagatgagaactacatatccctctttaggggatggtgtgtgtatgtgtgtgtgatggagaatctgggcatctgggttgggaattttattttgtaagcatttcctacataatatgagtttctactttgataaagtcttgtgttttctgtg

SEQ ID NO: 44 - protein, 530 aa, Mus musculus
MARAAVLPPSRLSPTLPLLPLLLLLLQETGAQDVRVRVLPEVRGRLGGTVELPCHLLPPTTERVSQVTWQRLDGTVVAAFHPSFGVDFPNSQFSKDRLSFVRARPETNADLRDATLAFRGLRVEDEGNYTCEFATFPNGTRRGVTWLRVIAQPENHAEAQEVTIGPQSVAVARCVSTGGRPPARITWISSLGGEAKDTQEPGIQAGTVTIISRYSLVPVGRADGVKVTCRVEHESFEEPILLPVTLSVRYPPEVSISGYDDNWYLGRSEAILTCDVRSNPEPTDYDWSTTSGVFPASAVAQGSQLLVHSVDRMVNTTFICTATNAVGTGRAEQVILVRESPSTAGAGATGGIIGGIIAAIIATAVAGTGILICRQQRKEQRLQAADEEEELEGPPSYKPPTPKAKLEEPEMPSQLFTLGASEHSPVKTPYFDAGVSCADQEMPRYHELPTLEERSGPLLLGATGLGPSLLVPPGPNVVEGVSLSLEDEEEDDEEEDFLDKINPIYDALSYPSPSDSYQSKDFFVSRAMYV

SEQ ID NO: 45 - DNA, 1630 bp, Homo sapiens
acacatcaggggcttgctcttgcaaaaccaaaccacaagacagacttgcaaaagaaggcatgcacagctcagcactgctctgttgcctggtcctcctgactggggtgagggccagcccaggccagggcacccagtctgagaacagctgcacccacttcccaggcaacctgcctaacatgcttcgagatctccgagatgccttcagcagagtgaagactttctttcaaatgaaggatcagctggacaacttgttgttaaaggagtccttgctggaggactttaagggttacctgggttgccaagccttgtctgagatgatccagttttacctggaggaggtgatgccccaagctgagaaccaagacccagacatcaaggcgcatgtgaactccctgggggagaacctgaagaccctcaggctgaggctacggcgctgtcatcgatttcttccctgtgaaaacaagagcaaggccgtggagcaggtgaagaatgcctttaataagctccaagagaaaggcatctacaaagccatgagtgagtttgacatcttcatcaactacatagaagcctacatgacaatgaagatacgaaactgagacatcagggtggcgactctatagactctaggacataaattagaggtctccaaaatcggatctggggctctgggatagctgacccagccccttgagaaaccttattgtacctctcttatagaatatttattacctctgatacctcaacccccatttctatttatttactgagcttctctgtgaacgatttagaaagaagcccaatattataatttttttcaatatttattattttcacctgtttttaagctgtttccatagggtgacacactatggtatttgagtgttttaagataaattataagttacataagggaggaaaaaaaatgttctttggggagccaacagaagcttccattccaagcctgaccacgctttctagctgttgagctgttttccctgacctccctctaatttatcttgtctctgggcttggggcttcctaactgctacaaatactcttaggaagagaaaccagggagcccctttgatgattaattcaccttccagtgtctcggagggattcccctaacctcattccccaaccacttcattcttgaaagctgtggccagcttgttatttataacaacctaaatttggttctaggccgggcgcggtggctcacgcctgtaatcccagcactttgggaggctgaggcgggtggatcacttgaggtcaggagttcctaaccagcctggtcaacatggtgaaaccccgtctctactaaaaatacaaaaattagccgggcatggtggcgcgcacctgtaatcccagctacttgggaggctgaggcaagagaattgcttgaacccaggagatggaagttgcagtgagctgatatcatgcccctgtactccagcctgggtgacagagcaagactctgtctcaaaaaataaaaataaaaataaatttggttctaatagaactcagttttaactagaatttattcaattcctctgggaatgttacattgtttgtctgtcttcatagcagattttaattttgaataaataaatgtatcttattcacatca

SEQ ID NO: 46 - protein, 178 aa, Homo sapiens
MHSSALLCCLVLLTGVRASPGQGTQSENSCTHFPGNLPNMLRDLRDAFSRVKTFFQMKDQLDNLLLKESLLEDFKGYLGCQALSEMIQFYLEEVMPQAENQDPDIKAHVNSLGENLKTLRLRLRRCHRFLPCENKSKAVEQVKNAFNKLQEKGIYKAMSEFDIFINYIEAYMTMKIRN

SEQ ID NO: 47 - DNA, 1306 bp, Mus musculus
acatttagagacttgctcttgcactaccaaagccacaaggcagccttgcagaaaagagagctccatcatgcctggctcagcactgctatgctgcctgctcttactgactggcatgaggatcagcaggggccagtacagccgggaagacaataactgcacccacttcccagtcggccagagccacatgctcctagagctgcggactgccttcagccaggtgaagactttctttcaaacaaaggaccagctggacaacatactgctaaccgactccttaatgcaggactttaagggttacttgggttgccaagccttatcggaaatgatccagttttacctggtagaagtgatgccccaggcagagaagcatggcccagaaatcaaggagcatttgaattccctgggtgagaagctgaagaccctcaggatgcggctgaggcgctgtcatcgatttctcccctgtgaaaataagagcaaggcagtggagcaggtgaagagtgattttaataagctccaagaccaaggtgtctacaaggccatgaatgaatttgacatcttcatcaactgcatagaagcatacatgatgatcaaaatgaaaagctaaaacacctgcagtgtgtattgagtctgctggactccaggacctagacagagctctctaaatctgatccagggatcttagctaacggaaacaactccttggaaaacctcgtttgtacctctctccgaaatatttattacctctgatacctcagttcccattctatttattcactgagcttctctgtgaactatttagaaagaagcccaatattataattttacagtatttattatttttaacctgtgtttaagctgtttccattggggacactttatagtatttaaagggagattatattatatgatgggaggggttcttccttgggaagcaattgaagcttctattctaaggctggccacacttgagagctgcagggccctttgctatggtgtcctttcaattgctctcatccctgagttcagagctcctaagagagttgtgaagaaactcatgggtcttgggaagagaaaccagggagatcctttgatgatcattcctgcagcagctcagagggttcccctactgtcatcccccagccgcttcatccctgaaaactgtggccagtttgttatttataaccacctaaaattagttctaatagaactcatttttaactagaagtaatgcaattcctctgggaatggtgtattgtttgtctgcctttgtagcagactctaattttgaataaatggatcttattcg

SEQ ID NO: 48 - protein, 178 aa, Mus musculus
MPGSALLCCLLLLTGMRISRGQYSREDNNCTHFPVGQSHMLLELRTAFSQVKTFFQTKDQLDNILLTDSLMQDFKGYLGCQALSEMIQFYLVEVMPQAEKHGPEIKEHLNSLGEKLKTLRMRLRRCHRFLPCENKSKAVEQVKSDFNKLQDQGVYKAMNEFDIFINCIEAYMMIKMKS

SEQ ID NO: 49 - DNA, 1439 bp, Homo sapiens
agtcacatttcagccactgctctgagaatttgtgagcagcccctaacaggctgttacttcactacaactgacgatatgatcatcttaatttacttatttctcttgctatgggaagacactcaaggatggggattcaaggatggaatttttcataactccatatggcttgaacgagcagccggtgtgtaccacagagaagcacggtctggcaaatacaagctcacctacgcagaagctaaggcggtgtgtgaatttgaaggcggccatctcgcaacttacaagcagctagaggcagccagaaaaattggatttcatgtctgtgctgctggatggatggctaagggcagagttggataccccattgtgaagccagggcccaactgtggatttggaaaaactggcattattgattatggaatccgtctcaataggagtgaaagatgggatgcctattgctacaacccacacgcaaaggagtgtggtggcgtctttacagatccaaagcaaatttttaaatctccaggcttcccaaatgagtacgaagataaccaaatctgctactggcacattagactcaagtatggtcagcgtattcacctgagttttttagattttgaccttgaagatgacccaggttgcttggctgattatgttgaaatatatgacagttacgatgatgtccatggctttgtgggaagatactgtggagatgagcttccagatgacatcatcagtacaggaaatgtcatgaccttgaagtttctaagtgatgcttcagtgacagctggaggtttccaaatcaaatatgttgcaatggatcctgtatccaaatccagtcaaggaaaaaatacaagtactacttctactggaaataaaaactttttagctggaagatttagccacttataaaaaaaaaaaaaaggatgatcaaaacacacagtgtttatgttggaatcttttggaactcctttgatctcactgttattattaacatttatttattatttttctaaatgtgaaagcaatacataatttagggaaaattggaaaatataggaaactttaaacgagaaaatgaaacctctcataatcccactgcatagaaataacaagcgttaacattttcatatttttttctttcagtcatttttctatttgtggtatatgtatatatgtacctatatgtatttgcatttgaaattttggaatcctgctctatgtacagttttgtattatactttttaaatcttgaactttataaacattttctgaaatcattgattattctacaaaaacatgattttaaacagctgtaaaatattctatgatatgaatgttttatgcattatttaagcctgtctctattgttggaatttcaggtcattttcataaatattgttgcaataaatatccttgaacacacaaaaaaaaaaaaaaaa

SEQ ID NO: 50 - protein, 277 aa, Homo sapiens
MIILIYLFLLLWEDTQGWGFKDGIFHNSIWLERAAGVYHREARSGKYKLTYAEAKAVCEFEGGHLATYKQLEAARKIGFHVCAAGWMAKGRVGYPIVKPGPNCGFGKTGIIDYGIRLNRSERWDAYCYNPHAKECGGVFTDPKQIFKSPGFPNEYEDNQICYWHIRLKYGQRIHLSFLDFDLEDDPGCLADYVEIYDSYDDVHGFVGRYCGDELPDDIISTGNVMTLKFLSDASVTAGGFQIKYVAMDPVSKSSQGKNTSTTSTGNKNFLAGRFSHL

SEQ ID NO: 51 - DNA, 1601 bp, Mus musculus
ccgctgctctgagaatttcgtgtgggcagccccgacattgtaaccggctctgcaaccgaagagatggtcgtcctcctttgcttatgcgtcttgctgtgggaagaggctcacggatggggattcaagaacgggatctttcataactccatatggcttgaacaagcagcgggcgtataccacagagaagctcgggctggcagatacaagctcacctacgccgaagccaaggccgtatgtgaatttgaaggtggtcgtctcgcaacctacaagcagctagaggcagccagaaaaattggattccatgtctgtgctgctggatggatggccaagggtagagtcggataccccattgtgaaacctgggcccaactgtggatttgggaaaacgggtatcatcgattatggaatccggctcaacaggagtgagcgatgggatgcctattgctacaacccacatgcaaaggagtgtggtggtgtcttcacagatccgaagcgaatttttaaatccccgggcttcccaaatgagtacgatgacaaccaggtctgctactggcacattcggctcaagtacggtcagcgaattcacctgagctttttggactttgaccttgaacatgatccaggctgcttggctgactatgtagaaatctatgacagttatgatgacgtccacggctttgtaggaagatactgtggtgatgaacttccagaagacatcattagcacaggaaatgtcatgaccttgaagtttctgagtgatgcatccgtcacggctggaggcttccagattaaatacgtcacagtggatcctgcatctaaatccagtcaagccaaaaatacaagtactactggaaataagaagttcttacctggaaggtttagccatctataaaaaattttttttaaaaatgttcaaaacatccagtacaatatttatatttgtttttgttgttgttgttggtttttttttttttattttgttttgttttgtttttttgagacggggtttctctgtatagccttggctgtcctggaactcactttgaagaccaggctggcctcgaactcagaaatccacctgcctccgcctaccaagtgctgggattaaaggcgtccaccaccaccgcccggcttcaatatttatatttgtagctcttggacctcgtttgttctcttttgtatttttattattaacatgtatttattatttttccaaatgtgaaagccatatgtaattatgtggaaaattgacaaataaatacagagaacttcaaatgagttttttttttaaatctcataattgtactacacagaaataactaatgttaaagtttttaaatgtttgtctttcattcatttttctacttgtagtatatgtacatatgtaactctatgatttgcgtttgaattttggcattctgccttttgtaacctgatatttttaaccttgacattgtatagctcaagcacttcccaagatctctgagttttctacaaaatgggactttgtaaatatgattgttccctgctttatttaagctgaatttatattaggatttaaggttgttttcataaatattgctgtaataaatacttttggat

SEQ ID NO: 52 - protein, 275 aa, Mus musculus
MVVLLCLCVLLWEEAHGWGFKNGIFHNSIWLEQAAGVYHREARAGRYKLTYAEAKAVCEFEGGRLATYKQLEAARKIGFHVCAAGWMAKGRVGYPIVKPGPNCGFGKTGIIDYGIRLNRSERWDAYCYNPHAKECGGVFTDPKRIFKSPGFPNEYDDNQVCYWHIRLKYGQRIHLSFLDFDLEHDPGCLADYVEIYDSYDDVHGFVGRYCGDELPEDIISTGNVMTLKFLSDASVTAGGFQIKYVTVDPASKSSQAKNTSTTGNKKFLPGRFSHL

SEQ ID NO: 53 - DNA, 3295 bp, Homo sapiens
attcgggccgggcctcgctgcggcggcgactgagccaggctgggccgcgtccctgagtcccagagtcggcgcggcgcggcaggggcagccttccaccacggggagcccagctgtcagccgcctcacaggaagatgctgcgtcggcggggcagccctggcatgggtgtgcatgtgggtgcagccctgggagcactgtggttctgcctcacaggagccctggaggtccaggtccctgaagacccagtggtggcactggtgggcaccgatgccaccctgtgctgctccttctcccctgagcctggcttcagcctggcacagctcaacctcatctggcagctgacagataccaaacagctggtgcacagctttgctgagggccaggaccagggcagcgcctatgccaaccgcacggccctcttcccggacctgctggcacagggcaacgcatccctgaggctgcagcgcgtgcgtgtggcggacgagggcagcttcacctgcttcgtgagcatccgggatttcggcagcgctgccgtcagcctgcaggtggccgctccctactcgaagcccagcatgaccctggagcccaacaaggacctgcggccaggggacacggtgaccatcacgtgctccagctaccagggctaccctgaggctgaggtgttctggcaggatgggcagggtgtgcccctgactggcaacgtgaccacgtcgcagatggccaacgagcagggcttgtttgatgtgcacagcatcctgcgggtggtgctgggtgcaaatggcacctacagctgcctggtgcgcaaccccgtgctgcagcaggatgcgcacagctctgtcaccatcacaccccagagaagccccacaggagccgtggaggtccaggtccctgaggacccggtggtggccctagtgggcaccgatgccaccctgcgctgctccttctcccccgagcctggcttcagcctggcacagctcaacctcatctggcagctgacagacaccaaacagctggtgcacagtttcaccgaaggccgggaccagggcagcgcctatgccaaccgcacggccctcttcccggacctgctggcacaaggcaatgcatccctgaggctgcagcgcgtgcgtgtggcggacgagggcagcttcacctgcttcgtgagcatccgggatttcggcagcgctgccgtcagcctgcaggtggccgctccctactcgaagcccagcatgaccctggagcccaacaaggacctgcggccaggggacacggtgaccatcacgtgctccagctaccggggctaccctgaggctgaggtgttctggcaggatgggcagggtgtgcccctgactggcaacgtgaccacgtcgcagatggccaacgagcagggcttgtttgatgtgcacagcgtcctgcgggtggtgctgggtgcgaatggcacctacagctgcctggtgcgcaaccccgtgctgcagcaggatgcgcacggctctgtcaccatcacagggcagcctatgacattccccccagaggccctgtgggtgaccgtggggctgtctgtctgtctcattgcactgctggtggccctggctttcgtgtgctggagaaagatcaaacagagctgtgaggaggagaatgcaggagctgaggaccaggatggggagggagaaggctccaagacagccctgcagcctctgaaacactctgacagcaaagaagatgatggacaagaaatagcctgaccatgaggaccagggagctgctacccctccctacagctcctaccctctggctgcaatggggctgcactgtgagccctgcccccaacagatgcatcctgctctgacaggtgggctccttctccaaaggatgcgatacacagaccactgtgcagccttatttctccaatggacatgattcccaagtcatcctgctgccttttttcttatagacacaatgaacagaccacccacaaccttagttctctaagtcatcctgcctgctgccttatttcacagtacatacatttcttagggacacagtacactgaccacatcaccaccctcttcttccagtgctgcgtggaccatctggctgccttttttctccaaaagatgcaatattcagactgactgaccccctgccttatttcaccaaagacacgatgcatagtcaccccggccttgtttctccaatggccgtgatacactagtgatcatgttcagccctgcttccacctgcatagaatcttttcttctcagacagggacagtgcggcctcaacatctcctggagtctagaagctgtttcctttcccctccttcctcctcttgctctagccttaatactggccttttccctccctgccccaagtgaagacagggcactctgcgcccaccacatgcacagctgtgcatggagacctgcaggtgcacgtgctggaacacgtgtggttcccccctggcccagcctcctctgcagtgcccctctcccctgcccatcctccccacggaagcatgtgctggtcacactggttctccaggggtctgtgatggggcccctgggggtcagcttctgtccctctgccttctcacctctttgttcctttcttttcatgtatccattcagttgatgtttattgagcaactacagatgtcagcactgtgttaggtgctgggggccctgcgtgggaagataaagttcctccctcaaggactccccatccagctgggagacagacaactaactacactgcaccctgcggtttgcagggggctcctgcctggctccctgctccacacctcctctgtggctcaaggcttcctggatacctcacccccatcccacccataattcttacccagagcatggggttggggcggaaacctggagagagggacatagcccctcgccacggctagagaatctggtggtgtccaaaatgtctgtccaggtgtgggcaggtgggcaggcaccaaggccctctggacctttcatagcagcagaaaaggcagagcctggggcagggcagggccaggaatgctttggggacaccgaggggactgccccccacccccaccatggtgctattctggggctggggcagtcttttcctggcttgcctctggccagctcctggcctctggtagagtgagacttcagacgttctgatgccttccggatgtcatctctccctgccccaggaatggaagatgtgaggacttctaatttaaatgtgggactcggagggattttgtaaactgggggtatattttggggaaaataaatgtctttgtaaaaa

SEQ ID NO: 54 - protein, 534 aa, Homo sapiens
MLRRRGSPGMGVHVGAALGALWFCLTGALEVQVPEDPVVALVGTDATLCCSFSPEPGFSLAQLNLIWQLTDTKQLVHSFAEGQDQGSAYANRTALFPDLLAQGNASLRLQRVRVADEGSFTCFVSIRDFGSAAVSLQVAAPYSKPSMTLEPNKDLRPGDTVTITCSSYQGYPEAEVFWQDGQGVPLTGNVTTSQMANEQGLFDVHSILRVVLGANGTYSCLVRNPVLQQDAHSSVTITPQRSPTGAVEVQVPEDPVVALVGTDATLRCSFSPEPGFSLAQLNLIWQLTDTKQLVHSFTEGRDQGSAYANRTALFPDLLAQGNASLRLQRVRVADEGSFTCFVSIRDFGSAAVSLQVAAPYSKPSMTLEPNKDLRPGDTVTITCSSYRGYPEAEVFWQDGQGVPLTGNVTTSQMANEQGLFDVHSVLRVVLGANGTYSCLVRNPVLQQDAHGSVTITGQPMTFPPEALWVTVGLSVCLIALLVALAFVCWRKIKQSCEEENAGAEDQDGEGEGSKTALQPLKHSDSKEDDGQEIA

SEQ ID NO: 55 - DNA, 3197 bp, Mus musculus
cggcgcggcgcgccaaagtgacctggtacagcctggaccccaagctcatcggctttgtctggctggccgcctggcctcttcccacttggatttggatgatcctgaggcctttggaggaacttcgagacaaaggcccctcttcctcttccacgggcaggagcagccattcgccacggagagcccagctgtcagctgtctcacaggaagatgcttcgaggatggggtggccccagtgtgggtgtgtgtgtgcgcacagcactgggggtgctgtgcctctgcctcacaggagctgtggaagtccaggtctctgaagaccccgtggtggccctggtggacacggatgccaccctacgctgctccttttccccagagcctggcttcagtctggcacagctcaacctcatctggcagctgacagacaccaaacagctggtgcacagcttcacggagggccgggaccaaggcagtgcctactccaaccgcacagcgctcttccctgacctgttggtgcaaggcaatgcgtccttgaggctgcagcgcgtccgagtaaccgacgagggcagctacacctgctttgtgagcatccaggactttgacagcgctgctgttagcctgcaggtggccgccccctactcgaagcccagcatgaccctggagcccaacaaggacctacgtccagggaacatggtgaccatcacgtgctctagctaccagggctatccggaggccgaggtgttctggaaggatggacagggagtgcccttgactggcaatgtgaccacatcccagatggccaacgagcggggcttgttcgatgttcacagcgtgctgagggtggtgctgggtgctaacggcacctacagctgcctggtacgcaacccggtgttgcagcaagatgctcacggctcagtcaccatcacagggcagcccctgacattcccccctgaggctctgtgggtaaccgtggggctctctgtctgtcttgtggtactactggtggccctggctttcgtgtgctggagaaagatcaagcagagctgcgaggaggagaatgcaggtgccgaggaccaggatggagatggagaaggatccaagacagctctacggcctctgaaaccctctgaaaacaaagaagatgacggacaagaaattgcttgattgggagctgctgcccttcccaggtggggggcccaccctctggcagtgttgagcttcaatgcgagcccttcccccaacgaatgggtttgtcccacagatctacccgttcgtcaaaggacgtggtccatagaccacccacagccttacttttccaatggacttaattcccatcatcctgcagcctcatttctccagtgacacgatacacgaaccatcctgcggccttatttcccacggacacgacacaaagatgtccctcctcggtgttcctccagagtcgtctggtggccttgtgatacggcgtgaaccttcttccttctgccttacgtctaatggacacacacgcaccacccccacacccttgctcctccaaagccatgcagactgtgtaactgctattattctccaaggggcatcctgtgcagatgaaaccctgctttatttccctgaagacagctgcacagtgacctcttagttcttgctcccatggccctgatgtatcctagttaccagccctcaacctcagttctgagggtgggatcccatcgctcagcaaggcttcatcctgacctccctgccctgatctgatctggccctggcttttgttgtctcgctccctgactaagtgagatggggcactctcccgcccccgccccccccaggtcacagatacctacctgcagctgtgcgtgctggatcacgcacatacttgccttgcatggtctcctggctgccctgggctgtgcctgttcttccataggaagcaagttcttgtctccctggttctcagggcccctcaggggctcagccttcagccctgtgcttccccatgttgggaatctttgttacctttttcttctttgtaaattaacatctgataacaaccacagggtccaatgggactttcacagacctgccagctagataaataatgacaacagaagtttattaatattttaagacttaggccttttgctgggcagcctcccaactattctatcctgactaatcctggcactatgtcccaccacatggccaggtctacctctctgctccactctccatccacctccatgtctgccagcaaatctcccgtgattcagttcttctcccagagtccctatctctgcccagaagtaccatcttcgacttcctgcccaactattggccgtcagctcttcattaaagccgatcagatgtaattctagattgccttaggcaggtgaggaagaaacaagtatttgtaaaatatgagaccagcaatgggccatagaaataacagcaccagatcctgccagcatttagccctctgttggtacaaaattaacaattgaatatacagagacctacttccagagtgtaccccaacaacaggcgtgagcatggtgctgggtactagggtcctgctggaaaatcagagaccttacctacagctgggacatgaccttgcttccgacttacccaccacttctggatacctcaccctcagcccacactatccctggcctagggcccagggtagagccagaaacatggagaaagcatggccccttgccgtacctggagaactgggtattttccagagtctttatagatgtggactggaaggcaggtggccacagccgtgcagacctgggtcaggtcagaaacctatgccatgctgggacctactcaacagcagaagcatgaagagggcctgaggacaagaaaggccttcttaccatggtgctattctggagctgggatatatacctggcttgtctctgactgccctggcttctggcagaacttctgatgtcctcctgaaggcctctctcccaccccagtacctgagaacctgaggataatttaaacatgggactctggccagcacctgggagagacaggtagatctctgatttttgactcagcctggtctatcgagtgagttccaggacatctggggctacacagagaaaccatcttaaagactaaaaataataaacatgagactgtaaactgggtgtattttgggagaaataaatgtctttttctttcaa

SEQ ID NO: 56 - protein, 316 aa, Mus musculus
MLRGWGGPSVGVCVRTALGVLCLCLTGAVEVQVSEDPVVALVDTDATLRCSFSPEPGFSLAQLNLIWQLTDTKQLVHSFTEGRDQGSAYSNRTALFPDLLVQGNASLRLQRVRVTDEGSYTCFVSIQDFDSAAVSLQVAAPYSKPSMTLEPNKDLRPGNMVTITCSSYQGYPEAEVFWKDGQGVPLTGNVTTSQMANERGLFDVHSVLRVVLGANGTYSCLVRNPVLQQDAHGSVTITGQPLTFPPEALWVTVGLSVCLVVLLVALAFVCWRKIKQSCEEENAGAEDQDGDGEGSKTALRPLKPSENKEDDGQEIA

SEQ ID NO: 57 - DNA, 2605 bp, Homo sapiens
gtgagtcaccaaggaaggcagcggcagctccactcagccagtacccagatacgctgggaaccttccccagccatggcttccctggggcagatcctcttctggagcataattagcatcatcattattctggctggagcaattgcactcatcattggctttggtatttcagggagacactccatcacagtcactactgtcgcctcagctgggaacattggggaggatggaatcctgagctgcacttttgaacctgacatcaaactttctgatatcgtgatacaatggctgaaggaaggtgttttaggcttggtccatgagttcaaagaaggcaaagatgagctgtcggagcaggatgaaatgttcagaggccggacagcagtgtttgctgatcaagtgatagttggcaatgcctctttgcggctgaaaaacgtgcaactcacagatgctggcacctacaaatgttatatcatcacttctaaaggcaaggggaatgctaaccttgagtataaaactggagccttcagcatgccggaagtgaatgtggactataatgccagctcagagaccttgcggtgtgaggctccccgatggttcccccagcccacagtggtctgggcatcccaagttgaccagggagccaacttctcggaagtctccaataccagctttgagctgaactctgagaatgtgaccatgaaggttgtgtctgtgctctacaatgttacgatcaacaacacatactcctgtatgattgaaaatgacattgccaaagcaacaggggatatcaaagtgacagaatcggagatcaaaaggcggagtcacctacagctgctaaactcaaaggcttctctgtgtgtctcttctttctttgccatcagctgggcacttctgcctctcagcccttacctgatgctaaaataatgtgcctcggccacaaaaaagcatgcaaagtcattgttacaacagggatctacagaactatttcaccaccagatatgacctagttttatatttctgggaggaaatgaattcatatctagaagtctggagtgagcaaacaagagcaagaaacaaaaagaagccaaaagcagaaggctccaatatgaacaagataaatctatcttcaaagacatattagaagttgggaaaataattcatgtgaactagacaagtgtgttaagagtgataagtaaaatgcacgtggagacaagtgcatccccagatctcagggacctccccctgcctgtcacctggggagtgagaggacaggatagtgcatgttctttgtctctgaatttttagttatatgtgctgtaatgttgctctgaggaagcccctggaaagtctatcccaacatatccacatcttatattccacaaattaagctgtagtatgtaccctaagacgctgctaattgactgccacttcgcaactcaggggcggctgcattttagtaatgggtcaaatgattcactttttatgatgcttccaaaggtgccttggcttctcttcccaactgacaaatgccaaagttgagaaaaatgatcataattttagcataaacagagcagtcggcgacaccgattttataaataaactgagcaccttctttttaaacaaacaaatgcgggtttatttctcagatgatgttcatccgtgaatggtccagggaaggacctttcaccttgtctatatggcattatgtcatcacaagctctgaggcttctcctttccatcctgcgtggacagctaagacctcagttttcaatagcatctagagcagtgggactcagctggggtgatttcgccccccatctccgggggaatgtctgaagacaattttggttacctcaatgagggagtggaggaggatacagtgctactaccaactagtggatagaggccagggatgctgctcaacctcctaccatgtacaggacgtctccccattacaactacccaatccgaagtgtcaactgtgtcagggctaagaaaccctggttttgagtagaaaagggcctggaaagaggggagccaacaaatctgtctgcttcctcacattagtcattggcaaataagcattctgtctctttggctgctgcctcagcacagagagccagaactctatcgggcaccaggataacatctctcagtgaacagagttgacaaggcctatgggaaatgcctgatgggattatcttcagcttgttgagcttctaagtttctttcccttcattctaccctgcaagccaagttctgtaagagaaatgcctgagttctagctcaggttttcttactctgaatttagatctccagaccctgcctggccacaattcaaattaaggcaacaaacatataccttccatgaagcacacacagacttttgaaagcaaggacaatgactgcttgaattgaggccttgaggaatgaagctttgaaggaaaagaatactttgtttccagcccccttcccacactcttcatgtgttaaccactgccttcctggaccttggagccacggtgactgtattacatgttgttatagaaaactgattttagagttctgatcgttcaagagaatgattaaatatacatttcctacacca

SEQ ID NO: 58 - protein, 282 aa, Homo sapiens
MASLGQILFWSIISIIIILAGAIALIIGFGISGRHSITVTTVASAGNIGEDGILSCTFEPDIKLSDIVIQWLKEGVLGLVHEFKEGKDELSEQDEMFRGRTAVFADQVIVGNASLRLKNVQLTDAGTYKCYIITSKGKGNANLEYKTGAFSMPEVNVDYNASSETLRCEAPRWFPQPTVVWASQVDQGANFSEVSNTSFELNSENVTMKVVSVLYNVTINNTYSCMIENDIAKATGDIKVTESEIKRRSHLQLLNSKASLCVSSFFAISWALLPLSPYLMLK

SEQ ID NO: 59 - DNA, 2622 bp, Mus musculus
gtgagtcacaacacccaggagggcagcagcaggcaggcagctccactcaccaaaatctggccccacacacagcaggactgtgggaaggaactccctctccatggcttccttggggcagatcatcttttggagtattattaacatcatcatcatcctggctggggccatcgcactcatcattggctttggcatttcaggcaagcacttcatcacggtcacgaccttcacctcagctggaaacattggagaggacgggaccctgagctgcacttttgaacctgacatcaaactcaacggcatcgtcatccagtggctgaaagaaggcatcaaaggtttggtccacgagttcaaagaaggcaaagacgacctctcacagcagcatgagatgttcagaggccgcacagcagtgtttgctgatcaggtggtagttggcaatgcttccctgagactgaaaaacgtgcagctcacggatgctggcacctacacatgttacatccgcacctcaaaaggcaaagggaatgcaaaccttgagtataagaccggagccttcagtatgccagagataaatgtggactataatgccagttcagagagtttacgctgcgaggctcctcggtggttcccccagcccacagtggcctgggcatctcaagtcgaccaaggagccaatttctcagaagtctccaacaccagctttgagttgaactctgagaatgtgaccatgaaggtcgtatctgtgctctacaatgtcacaatcaacaacacatactcctgtatgattgaaaacgacattgccaaagccaccggggacatcaaagtgacagattcagaggtcaaaaggcgaagtcagctgcagttgctgaactctgggccttccccgtgtgttttttcttctgcctttgtggctggctgggcactcctatctctctcctgttgcctgatgctaagatgaggggccctggctacacaaaagcatgcaacgttgctggtccaacagaatcccggagaactacagaaatattttcctcaagacatgacctagttttatatttctagaagaagatgaaatcatgtctagaagtctggagagagcagacaggaacaagatgtggaaggaaaacaaaagtaacccacagacacccccgatcggaacaagatggacctagaaaataattcaaccaaactagagtatactaagtgtgctgttacaatgtgtgtagggtaggtgtcctcccacatctcaggggcctcccctggtccaccagctcctgagttaggatgggctgttatgatgtcactctgaaggttcctggatggttcctactgccatatactcattttatattcagcacattaaaccatagtgaatgctatgaaaagctgctaatcagctgccactccgagattcggaggtggcaacgtctgagtgacaggtccagtgattcgcttctccttaggatgcttttacaagctctttggcgtctcctcccacctggcaaatgccaaatgcataggggagggtgatcatcattctagggcaaacaaaatagttgagggatgctgatttcccaaatcatccgaatcacttctcccttgagcaaacaagcgccctgttatttctcaaatgctgctttgtgaatcagtccagggcaaggcgctctcctcatcccgctatgtggccttaagtcatcgtaaggtttgaagtttctactttcgatcctgcatggagagctataatctcagctcccccgccccccccacacacacctctgcacacacacccccccccaacactgggagtaaaccaggatgatgtccgtcttctcattccccatgtgaccgttggcagtgtagagagactgattgtcacagctaaaggaagagggacaacagggtcactggtgtctacagagattatattctacgtgtctcactgaatttacacaactccaagtgccaaccacatcaaggtcaggaaatcctgaactggaataagaaagacccagaagatgaatgtgaacagatccatttgcttcccgacagtgggcacagacttcagtctctggctactgttccaagacccagggctctgcaattgtgtgacatccttcagtgaacccacatgggaaattctccatggaattatcttcagcccactgtacttctgaatccctcttccttccttctgtgccacacagcaagtctggcttaaatgctgcctgatctccatttcaagttttctgcctctggatttttagatctcaagaccatggacgaaacatcagttacagcaacaaaagtgaattttccgtgcagagacttctaggggttctgtttgttttcagggtgctagagatcacactcagatgctcatatatgttaggtaaatgttctcccactgagttacagcccagctcacacagagacttctaaaagaaaatacggccatgctctttgaaatggagcattgagggatgaagtttggatggcgaagaaaacttctcaccagctctctccccacattcgtgccaagcactgcctccctagacttcgggtcaccatatctgtactacgttttgatacagaaggctcgagaccattcaagagaattatttagtacac

SEQ ID NO: 60 - protein, 283 aa, Mus musculus
MASLGQIIFWSIINIIIILAGAIALIIGFGISGKHFITVTTFTSAGNIGEDGTLSCTFEPDIKLNGIVIQWLKEGIKGLVHEFKEGKDDLSQQHEMFRGRTAVFADQVVVGNASLRLKNVQLTDAGTYTCYIRTSKGKGNANLEYKTGAFSMPEINVDYNASSESLRCEAPRWFPQPTVAWASQVDQGANFSEVSNTSFELNSENVTMKVVSVLYNVTINNTYSCMIENDIAKATGDIKVTDSEVKRRSQLQLLNSGPSPCVFSSAFVAGWALLSLSCCLMLR

SEQ ID NO: 61 - DNA, 4714 bp, Homo sapiens
agtcgcgggaggcttccccgcgccggccgcgtcccgcccgctccccggcaccagaagttcctctgcgcgtccgacggcgacatgggcgtccccacggccctggaggccggcagctggcgctggggatccctgctcttcgctctcttcctggctgcgtccctaggtccggtggcagccttcaaggtcgccacgccgtattccctgtatgtctgtcccgaggggcagaacgtcaccctcacctgcaggctcttgggccctgtggacaaagggcacgatgtgaccttctacaagacgtggtaccgcagctcgaggggcgaggtgcagacctgctcagagcgccggcccatccgcaacctcacgttccaggaccttcacctgcaccatggaggccaccaggctgccaacaccagccacgacctggctcagcgccacgggctggagtcggcctccgaccaccatggcaacttctccatcaccatgcgcaacctgaccctgctggatagcggcctctactgctgcctggtggtggagatcaggcaccaccactcggagcacagggtccatggtgccatggagctgcaggtgcagacaggcaaagatgcaccatccaactgtgtggtgtacccatcctcctcccaggatagtgaaaacatcacggctgcagccctggctacgggtgcctgcatcgtaggaatcctctgcctccccctcatcctgctcctggtctacaagcaaaggcaggcagcctccaaccgccgtgcccaggagctggtgcggatggacagcaacattcaagggattgaaaaccccggctttgaagcctcaccacctgcccaggggatacccgaggccaaagtcaggcaccccctgtcctatgtggcccagcggcagccttctgagtctgggcggcatctgctttcggagcccagcacccccctgtctcctccaggccccggagacgtcttcttcccatccctggaccctgtccctgactctccaaactttgaggtcatctagcccagctgggggacagtgggctgttgtggctgggtctggggcaggtgcatttgagccagggctggctctgtgagtggcctccttggcctcggccctggttccctccctcctgctctgggctcagatactgtgacatcccagaagcccagcccctcaacccctctggatgctacatggggatgctggacggctcagcccctgttccaaggattttggggtgctgagattctcccctagagacctgaaattcaccagctacagatgccaaatgacttacatcttaagaagtctcagaacgtccagcccttcagcagctctcgttctgagacatgagccttgggatgtggcagcatcagtgggacaagatggacactgggccaccctcccaggcaccagacacagggcacggtggagagacttctcccccgtggccgccttggctcccccgttttgcccgaggctgctcttctgtcagacttcctctttgtaccacagtggctctggggccaggcctgcctgcccactggccatcgccaccttccccagctgcctcctaccagcagtttctctgaagatctgtcaacaggttaagtcaatctggggcttccactgcctgcattccagtccccagagcttggtggtcccgaaacgggaagtacatattggggcatggtggcctccgtgagcaaatggtgtcttgggcaatctgaggccaggacagatgttgccccacccactggagatggtgctgagggaggtgggtggggccttctgggaaggtgagtggagaggggcacctgccccccgccctccccatcccctactcccactgctcagcgcgggccattgcaagggtgccacacaatgtcttgtccaccctgggacacttctgagtatgaagcgggatgctattaaaaactacatggggaaacaggtgcaaaccctggagatggattgtaagagccagtttaaatctgcactctgctgctcctcccccacccccaccttccactccatacaatctgggcctggtggagtcttcgcttcagagccattcggccaggtgcgggtgatgttcccatctcctgcttgtgggcatgccctggctttgtttttatacacataggcaaggtgagtcctctgtggaattgtgattgaaggattttaaagcaggggaggagagtagggggcatctctgtacactctgggggtaaaacagggaaggcagtgcctgagcatggggacaggtgaggtggggctgggcagaccccctgtagcgtttagcaggatgggggccccaggtactgtggagagcatagtccagcctgggcatttgtctcctagcagcctacactggctctgctgagctgggcctgggtgctgaaagccaggatttggggctaggcgggaagatgttcgcccaattgcttggggggttggggggatggaaaaggggagcacctctaggctgcctggcagcagtgagccctgggcctgtggctacagccagggaaccccacctggacacatggccctgcttctaagccccccagttaggcccaaaggaatggtccactgagggcctcctgctctgcctgggctgggccaggggctttgaggagagggtaaacataggcccggagatggggctgacacctcgagtggccagaatatgcccaaaccccggcttctcccttgtccctaggcagaggggggtcccttcttttgttccctctggtcaccacaatgcttgatgccagctgccataggaagagggtgctggctggccatggtggcacacacctgtcctcccagcactttgcagggctgaggtggaaggaccgcttaagcccaggtgttcaaggctgctgtgagctgtgttcgagccactacactccagcctggggacggagcaaaactttgcctcaaaacaaattttaaaaagaaagaaagaaggaaagagggtatgtttttcacaattcatgggggcctgcatggcaggagtggggacaggacacctgctgttcctggagtcgaaggacaagcccacagcccagattccggttctcccaactcaggaagagcatgccctgccctctggggaggctggcctggccccagccctcagctgctgaccttgaggcagagacaacttctaagaatttggctgccagaccccaggcctggctgctgctgtgtggagagggaggcggcccgcagcagaacagccaccgcacttcctcctcagcttcctctggtgcggccctgccctctcttctctggacccttttacaactgaacgcatctgggcttcgtggtttcctgttttcagcgaaatttactctgagctcccagttccatcttcatccatggccacaggccctgcctacaacgcactagggacgtccctccctgctgctgctggggaggggcaggctgctggagccgccctctgagttgcccgggatggtagtgcctctgatgccagccctggtggctgtgggctggggtgcatgggagagctgggtgcgagaacatggcgcctccagggggcgggaggagcactaggggctggggcaggaggctcctggagcgctggattcgtggcacagtctgaggccctgagagggaaatccatgcttttaagaactaattcattgttaggagatcaatcaggaattaggggccatcttacctatctcctgacattcacagtttaatagagacttcctgcctttattccctcccagggagaggctgaaggaatggaattgaaagcaccatttggagggttttgctgacacagcggggactgctcagcactccctaaaaacacaccatggaggccactggtgactgctggtgggcaggctggccctgcctgggggagtccgtggcgatgggcgctggggtggaggtgcaggagccccaggacctgcttttcaaaagacttctgcctgaccagagctcccactacatgcagtggcccagggcagaggggctgatacatggcctttttcagggggtgctcctcgcggggtggacttgggagtgtgcagtgggacagggggctgcaggggtcctgccaccaccgagcaccaacttggcccctggggtcctgcctcatgaatgaggccttccccagggctggcctgactgtgctgggggctgggttaacgttttctcagggaaccacaatgcacgaaagaggaactggggttgctaaccaggatgctgggaacaaaggcctcttgaagcccagccacagcccagctgagcatgaggcccagcccatagacggcacaggccacctggcccattccctgggcattccctgctttgcattgctgcttctcttcaccccatggaggctatgtcaccctaactatcctggaatgtgttgagagggattctgaatgatcaatatagcttggtgagacagtgccgagatagatagccatgtctgccttgggcacgggagagggaagtggcagcatgcatgctgtttcttggccttttctgttagaatacttggtgctttccaacacactttcacatgtgttgtaacttgtttgatccacccccttccctgaaaatcctgggaggttttattgctgccatttaacacagagggcaatagaggttctgaaaggtctgtgtcttgtcaaaacaagtaaacggtggaactacgactaaa

SEQ ID NO: 62 - protein, 311 aa, Homo sapiens
MGVPTALEAGSWRWGSLLFALFLAASLGPVAAFKVATPYSLYVCPEGQNVTLTCRLLGPVDKGHDVTFYKTWYRSSRGEVQTCSERRPIRNLTFQDLHLHHGGHQAANTSHDLAQRHGLESASDHHGNFSITMRNLTLLDSGLYCCLVVEIRHHHSEHRVHGAMELQVQTGKDAPSNCVVYPSSSQDSENITAAALATGACIVGILCLPLILLLVYKQRQAASNRRAQELVRMDSNIQGIENPGFEASPPAQGIPEAKVRHPLSYVAQRQPSESGRHLLSEPSTPLSPPGPGDVFFPSLDPVPDSPNFEVI

SEQ ID NO: 63 - DNA, 4846 bp, Mus musculus
gggggcgctgctgggcggggagcttgctcggccgcctgcctcgccttgggctcagcattcactctagcgagcgagcggcgtgtacagccggctccctgggctcctggagtcccgcttgctccaagcgcactccagcagtctctttctgctcttgcccggctcgacggcgacatgggtgtccccgcggtcccagaggccagcagcccgcgctggggaaccctgctccttgctattttcctggctgcatccagaggtctggtagcagccttcaaggtcaccactccatattctctctatgtgtgtcccgagggacagaatgccaccctcacctgcaggattctgggccccgtgtccaaagggcacgatgtgaccatctacaagacgtggtacctcagctcacgaggcgaggtccagatgtgcaaagaacaccggcccatacgcaacttcacattgcagcaccttcagcaccacggaagccacctgaaagccaacgccagccatgaccagccccagaagcatgggctagagctagcttctgaccaccacggtaacttctctatcaccctgcgcaatgtgaccccaagggacagcggcctctactgctgtctagtgatagaattaaaaaaccaccacccagaacaacggttctacgggtccatggagctacaggtacaggcaggcaaaggctcggggtccacatgcatggcgtctaatgagcaggacagtgacagcatcacggctgcggccctggccaccggcgcctgcatcgtgggaatcctctgcctcccccttatcctgctgctggtctataagcagagacaggtggcctctcaccgccgtgcccaggagttggtgaggatggacagcagcaacacccaaggaatcgaaaacccaggcttcgagaccactccacccttccaggggatgcctgaggccaagaccaggccgccactgtcctatgtggcccagcggcaaccttcggagtcaggacggtacctgctctctgaccccagcacacctctgtcgcctccaggccctggggacgtctttttcccatccctagatccagtccctgactcccctaactctgaagccatctaaaccagctggggaaccatgaaccatggtacctgggtcagggatatgtgcacttgatctatggctggcccttggacagtcttttaggcactgactccagcttccttgctcctgctctgagcctagactctgcttttacaagatgcacagaccctcccctatctctttcagacgctacttggggggcagggagaagatgttggattgctcattgctgttctcaagatcttgggatgctgagttctccctagagacttgacttcgacagccacagatgtcagatgacctgcatcctatgaacgtccggcttggcaagagcctttcttcatggaaaccagtagcccggaggggatgaggtaggcaccttgccaccctcccgggagagagacacaagatgtgagagactcctgctcactgtgggggtgtggctggcctgcttgtttgcctgaggatgctcctctgttggactgactctatccccctggattctggagcttggctggcctatgtcccaccagaggagcatctcagcagccttccaccagcaacctgagggcctgccagcttcgtggctctgggctctcattacctgtatggccgtccacagagctcagtggccagaggctttgaaacaggaagtacatgtcaggttcaggaaccactgtgagctcattagtgtcttgagcaatgtgaggcctggaccagtggacacggagggagggtggcgagaggatgatggggatgatgaggggaacacgctcccttcctgtccttgtcatccaccactaccactattcagtgtggagcagtggcaaaggtgaccgacctccacaatgtcctagtgatgctggaccatttctaagtgtgaaagagatgctattaaaaacagtatgtggcaatggctgccaacagctgagtggactggaggcactggctttaaggccctggaggtgcagggcccggtatggggatagggatgggagtttcagtgagggcctagggatcactccgcttctgaccactcttcttctgagcctcacctcagggtgaccttcaggcacacagaagagcttgcccctggtccgatactactcttggctctcatctccagggtttggcatgacctgggcacacagggggagtcttcagaaaggattttaaagcatgaaaagaaagggtagttcttgtgaggtagggatgggcagctgatgtttgagagtgaggagggatacggctgggcagatcactctccagtctctagagggaaagtagctctaagtctgggagagcagcagcccagtggtaccatatgtcttcttgcagcttccactggctgggctgaactgggcatgggtaggaaagctcctgttctgggcctgcagccagggagaaccccattcattccctgaggacagatgggtggggagagaagagagagtttcaggccgggaagcagcaataagctatctgctggggacccagacaagttgtctgatgaggtccaagatgtgggatgccagttatacctggggcttggggatccttagaggctttgtatcatcatcataggagtgtcggggtggccagggcatcaaagccatgacccctgttttatcctcagggtccactcttctgcaccatccattgctctagatctatgcagttactatagacagaatgtgttgttctgtttggctttggggataatggcctggcgaactgccagctgttcagtggcagggctgtgaggccagtcaaagactagaacccacagaccagctgaacgatgagtatagcctgtcccctgggggagcctgacctgtctccagccctaagcttcagacctcaccactcagatgacttctaagaatttgcctgtggggacccctgcatggctgcagctccgtggaaaggagaggaggcccccagcagaagaaccactcgcttcctgcccagcttcctcctgtagggctctaagtctcttcttcttgggaccctgcaagcaaaggcatgtcagcttggtggtttcctgttttgggtgaagttttgtgtggtccgggttctgtctacatccatgaacttgggtgctaccaccttgctgctgctgtagagacagctgcaggatcttagggtggaaaatggaggtgccctgaggtgctagcccttggggcaaaagatggggtggcaatgagacacagtggggaactgagttccccaagaggagggaggagccctgtagcctcaagggccatattgggttcctggtaccagcaaaagcctagagagcgaagtctgtattttgaggaggtaattgatccttacggaatccatcagaaatttggagcgggtgctttatctatctctggagggtctctacctatctccgatgaagctctccctgggcctgggatgggagaaaccaggaggaaaggtgtctgataaagcaggggcttcttgacaagccaaagggccactggtagctgttgtggaccgagctgaccctgctgaagtattgtagtgtgccttggaccaacttctcaaaagagcaaccccggggctaccctacttctgccaggaagaggcggagaaggggctgagaggcctggaaggggctagctccttctttgagaactgctccccggaggacttggaggaggcggctaggctacgggctgctgagggccctttgtctttcctaacctgggcactgttaggatgctccctcctggaaaaggctttcctgggtgtgagctagagcagtgtccatgccagcgctgaacctgccatggtgggagctgaactaaaaatttctcagggaactaaaataggcaaaagaggaactgggggaggagggtgccaggcaggatggggggaagggagggcagtgcaaaagtctcttgaaacacagacagcccagctgagtgccagtcccagatcacagagaatacggctcatctggctcatgttctgcatgcttgctgctttaccctggcactttccttctccaccatgagtgcgagtcctgggagtcctgggagggtgaggattaatgccagcctggggagcagatagctgacagagtccttgggtaactggcttgaaccaggacctcaggattccactctggggatctagctttgtctgggccagtgaagatctctataatggcattattgccaggggataaacatttcactgggttctgatctgttgggtgtggcttcctggaaaatatggtgagaggaattctgctaaggatacagttgataagaaagttctgagattgattagtaatgcctgccttggactcaggaagggaagtggcagtatgaatgccatgtcttaatcattttggttaaaatatgcttcccaaaagatttccacgtgtgttcttgtttatttgacatctgtctccatatcagtcttgaaagcctttctgtgtgtatatatatgatgtttgcgtgtatatatgtttttgtgtgtgcatatggaagtcagaaatcactgggtgtcttcctccattcctttgcaatgtatgttttttttttttttacgatttatttactatatgaatgttttgcctgaatacatgcataggtgtcacgtacatgcctgctggaacgcttggaactggagttacaggtggctatgagctacagtgtgagcactgggaatcaaacctgggtcttctgcaagagcaacaaattaaaagtcagctcttaactacttgagctatttttccaactcc

SEQ ID NO: 64 - protein, 309 aa, Mus musculus
MGVPAVPEASSPRWGTLLLAIFLAASRGLVAAFKVTTPYSLYVCPEGQNATLTCRILGPVSKGHDVTIYKTWYLSSRGEVQMCKEHRPIRNFTLQHLQHHGSHLKANASHDQPQKHGLELASDHHGNFSITLRNVTPRDSGLYCCLVIELKNHHPEQRFYGSMELQVQAGKGSGSTCMASNEQDSDSITAAALATGACIVGILCLPLILLLVYKQRQVASHRRAQELVRMDSSNTQGIENPGFETTPPFQGMPEAKTRPPLSYVAQRQPSESGRYLLSDPSTPLSPPGPGDVFFPSLDPVPDSPNSEAI

SEQ ID NO: 65 - DNA, 2666 bp, Homo sapiens
agttctcttcaagtcatgtaatcgacttttttgaattagttttcagtttcattttgttttccctaattcaagttgggaacacttcattttccccaattcaagttgggaacacttccttggtatttccttgctacatggactttagcaaatgctactttactctccttccagctactcaggaggctgaggcaggagaatcgcttgaacccgggaggcggaggttacagtgagccttttcctagttttactgttggaagcctaactcacaggagagattatgcaatacagtcctgaagtcaagggaggagagcatgtaggagaatactaaccctgcacagattgtgatggtgatgtggaatatactaaagcctagaacgcacctcctctgcatgactaatatgttctgcacaagacatgaaggcacagacagcactgtctttcttcctcattctcataacatctctgagtggatctcaaggcatattccctttggctttcttcatttatgttcctatgaatgaacaaatcgtcattggaagacttgatgaagatataattctcccttcttcatttgagaggggatccgaagtcgtaatacactggaagtatcaagatagctataaggttcacagttactacaaaggcagtgaccatttggaaagccaagatcccagatatgcaaacaggacatcccttttctataatgagattcaaaatgggaatgcgtcgctatttttcagaagagtaagccttctggacgaaggaatttacacctgctatgtaggaacagcaattcaagtgattacaaacaaagtggtgctaaaggtgggagtttttctcacacccgtgatgaagtatgaaaagaggaacacaaacagcttcttaatatgcagcgtgttaagtgtttatcctcgtccaattatcacgtggaaaatggacaacacacctatctctgaaaacaacatggaagaaacagggtctttggattctttttctattaacagcccactgaatattacaggatcaaattcatcttatgaatgtacaattgaaaattcactgctgaagcaaacatggacagggcgctggacgatgaaagatggccttcataaaatgcaaagtgaacacgtttcactctcatgtcaacctgtaaatgattatttttcaccaaaccaagacttcaaagttacttggtccagaatgaaaagtgggactttctctgtcctggcttactatctgagctcctcacaaaatacaattatcaatgaatcccgattctcatggaacaaagagctgataaaccagagtgacttctctatgaatttgatggatcttaatctttcagacagtggggaatatttatgcaatatttcttcggatgaatatactttacttaccatccacacagtgcatgtagaaccgagccaagaaacagcttcccataacaaaggcttatggattttggtgccctctgcgattttggcagcttttctgctgatttggagcgtaaaatgttgcagagcccagctagaagccaggaggagcagacaccctgctgatggagcccaacaagaaagatgttgtgtccctcctggtgagcgctgtcccagtgcacccgataatggcgaagaaaatgtgcctctttcaggaaaagtataggaaatgagagaagactgtgacaactcatgacctgcatccttaatatccagtgacttcatctcccctttcttcaccacaattccaggcaatggcctgtcggagcagacaattctaccactgcaaagagttgtaaccattttctggtatcacatttatttttcaagacatacttttcaagacatcattcactgacccactacctgcattgagtataaatgcctggatgttaaggattccaatttaactttgaaaagaactgtctcattcatttacatttctgttacagtcagcccaggaggttacagtgagctctccactaagaatctggaagaaatgcatcactaggggttgattcccaatctgatcaactgataatgggtgagagagcaggtaagagccaaagtcaccttagtggaaaggttaaaaaccagagcctggaaaccaagatgattgatttgacaaggtattttagtctagttttatatgaacggttgtatcagggtaaccaactcgatttgggatgaatcttagggcaccaaagactaagacagtatctttaagattgctagggaaaagggccctatgtgtcaggcctctgagcccaagccaagcatcgcatcccctgtgatttgcacgtatacatccagatggcctaaagtaactgaagatccacaaaagaagtaaaaatagccttaactgatgacattccaccattgtgatttgttcctgccccaccctaactgatcaatgtactttgtaatctcccccacccttaagaaggtactttgtaatcttccccacccttaagaaggttctttgtaattctccccacccttgagaatgtactttgtgagatccaccctgcccacaaaacattgctcttaacttcaccgcctaacccaaaacctataagaactaatgataatccatcacccttcgctgactctcttttcggactcagcccacctgcacccaggtgaaataaacagctttattgctcacacaaa

SEQ ID NO: 66 - protein, 414 aa, Homo sapiens
MKAQTALSFFLILITSLSGSQGIFPLAFFIYVPMNEQIVIGRLDEDIILPSSFERGSEVVIHWKYQDSYKVHSYYKGSDHLESQDPRYANRTSLFYNEIQNGNASLFFRRVSLLDEGIYTCYVGTAIQVITNKVVLKVGVFLTPVMKYEKRNTNSFLICSVLSVYPRPIITWKMDNTPISENNMEETGSLDSFSINSPLNITGSNSSYECTIENSLLKQTWTGRWTMKDGLHKMQSEHVSLSCQPVNDYFSPNQDFKVTWSRMKSGTFSVLAYYLSSSQNTIINESRFSWNKELINQSDFSMNLMDLNLSDSGEYLCNISSDEYTLLTIHTVHVEPSQETASHNKGLWILVPSAILAAFLLIWSVKCCRAQLEARRSRHPADGAQQERCCVPPGERCPSAPDNGEENVPLSGKV

SEQ ID NO: 67 - DNA, 2113 bp, Mus musculus
acccttaaataagagctgaagatggctgcagctttctcctagactcctccaggagaaactctaaagccagagcctgggggcagcattgtgtgtccaccttgccactgagaacatctacggaaattggacactctggccccagcatccacacgcttgactgttggccacagtaacacaggtgtggatggtccccagagccagggtccaggagtgcactgaggatccctggggcttcaaggaacccacagctctgtccagacgggaatttttttcctgagaactttcacctgttgccctcctatggtgaacctggacttgaccttccactctgatgatgaagggctccccctccgtccctccagctggttgtctcctccctctgctcctcctgctgtttaccggagtctctggagaagtgtcttggttttctgtgaagggaccagctgagcccatcactgtcctgctggggactgaagccaccctgccctgccagctgtctcctgaacagagtgcagctcgcatgcacatccgatggtaccgtgcccagcccacccctgctgtgctggtgttccacaacggacaggagcagggagaggtgcagatgccggaatacaggggcaggacccagatggtgagacaagccattgacatgggaagtgtggctctgcagatacagcaggtccaggcctctgatgatggcctgtaccactgtcagtttacagatggcttcacctcccaagaggtctccatggagcttcgagtcataggtttaggctctgcccctcttgttcacatgacaggacctgagaatgatgggatccgagtgttgtgctcctcaagtggctggttcccaaaacccaaagtgcaatggagagacacctccgggaacatgctactgtcctcctctgagttgcagacccaagacagagaagggctcttccaggtggaagtgtctcttttggtcacagatagagctattggcaatgtgatctgctccatccaaaatcccatgtatgaccaggagaaatcgaaggccatcctcctcccagagcccttcttccccaagacgtgtccatggaaagtagccctggtttgttctgtcctcatactattggtcctgctcggtgggatcagccttggaatctggaaagaacatcaagtcaaaaggagagaaattaaaaaatggtcaaaggaacatgaagaaatgcttctgttgaagaaggggacaaaatctgtactgaagatcagagatgacctccaggccgacctagatcggaggaaggcgctgtacaaagaagactggaagaaggccttgctgtaccctgactggaggaaggagctgttccaggaggctcctgtgaggataaattatgaaatgcctgaccaggacaagacagactcaaggacagaagagaacagaggtgaggagactgtcagcagctcacaagtagaccacaacctcatcacactctcccaggaaggcttcatgttgggaagatactactgggaggtggatgtcaaggacacagaggagtggacactaggagtttatgagctgtgcactcaggatgcatcacttacagaccccttgaggaaattcagagtcctggaaaagaatggagatggatacagggctcttgacttctgttcccaaaacattaattcggaagaacctctgcaactgaagacacgtccgctgaagatcgccatcttcttggatcaggaagacaatgacctctctttctacaacatgaccgatgagacacacatcttttcctttgcccaggtccctttcttgggatcaccctatccttacttcacacgtaattccatggggctctctgcaacagcacagccctaagtgatgtgcacagggaattcaatgggtgggtgctgcagcgtgctacccgtaaggccctcttaggcaggcacagggggcctctgaccaagaggcctcttaacctgagactccatgagcctcggggatcagatcctggacaagattctcggaccatctgtgtcgtgcatggtgttatagttattaatagccttccttcttttgacaaaaatgtgtttaatcattcctaagataaatgaatccatggctttctga

SEQ ID NO: 68 - protein, 509 aa, Mus musculus
MMKGSPSVPPAGCLLPLLLLLFTGVSGEVSWFSVKGPAEPITVLLGTEATLPCQLSPEQSAARMHIRWYRAQPTPAVLVFHNGQEQGEVQMPEYRGRTQMVRQAIDMGSVALQIQQVQASDDGLYHCQFTDGFTSQEVSMELRVIGLGSAPLVHMTGPENDGIRVLCSSSGWFPKPKVQWRDTSGNMLLSSSELQTQDREGLFQVEVSLLVTDRAIGNVICSIQNPMYDQEKSKAILLPEPFFPKTCPWKVALVCSVLILLVLLGGISLGIWKEHQVKRREIKKWSKEHEEMLLLKKGTKSVLKIRDDLQADLDRRKALYKEDWKKALLYPDWRKELFQEAPVRINYEMPDQDKTDSRTEENRGEETVSSSQVDHNLITLSQEGFMLGRYYWEVDVKDTEEWTLGVYELCTQDASLTDPLRKFRVLEKNGDGYRALDFCSQNINSEEPLQLKTRPLKIAIFLDQEDNDLSFYNMTDETHIFSFAQVPFLGSPYPYFTRNSMGLSATAQP

SEQ ID NO: 69 - DNA, 1818 bp, Homo sapiens
actcattgcaccttcctgccaccccaggcagtgtctgggccctcagctccccctccctccacctaccccctcacacccaccactacgaccccacgggatacccagcccagacggaggaaacaccgagcctagagacatgagagttggaggagcattccaccttctactcgtgtgcctgagcccagcactgctgtctgctgtgcggatcaacggggatggacaggaggtcctgtacctggcagaaggtgataatgtgaggctgggctgcccctacgtcctggaccctgaggactatggtcccaatgggctggacatcgagtggatgcaggtcaactcagaccccgcccaccaccgagagaacgtgttccttagttaccaggacaagaggatcaaccatggcagccttccccatctgcagcagagggtccgctttgcagcctcagacccaagccagtacgatgcctccatcaacctcatgaacctgcaggtatctgatacagccacttatgagtgccgggtgaagaagaccaccatggccacccggaaggtcattgtcactgtccaagcacgacctgcagtgcccatgtgctggacagagggccacatgacatatggcaacgatgtggtgctgaagtgctatgccagtgggggctcccagcccctctcctacaagtgggccaagatcagtgggcaccattacccctatcgagctgggtcttacacctcccagcacagctaccactcagagctgtcctaccaggagtccttccacagctccataaaccaaggcctgaacaatggggacctggtgttgaaggatatctccagagcagatgatgggctgtatcagtgcacagtggccaacaacgtgggctacagtgtttgtgtggtggaggtgaaggtctcagactcccggcgtataggcgtgatcatcggcatcgtcctgggctctctgctcgcgctgggctgcctggccgtaggcatctgggggctcgtctgctgctgctgcgggggctccggggctggcggcgcccgcggtgccttcggctacggcaacggcggcggggtcggcggaggggcctgcggcgacttggctagtgagatcagagaggacgccgtggcgcccgggtgcaaggccagcgggcgcggcagccgcgtcacccacctcctggggtacccgacgcagaacgtcagccgctccctgcgccgcaagtacgcgcctcccccctgcggcggccccgaggacgtggccctggcgccctgcaccgccgccgccgcctgcgaagcgggcccctccccggtctacgtcaaggtcaagagcgcggagccggctgactgcgccgaggggccggtgcagtgcaagaacggcctcttggtgtgagcgcgcgcgccgggccgggctgcgccccagccaggaggagggcgcggggctctctgtctgcagctggggacacgtcggggctggggacgacctcgctcgccccaggctgccaggcggctgggggtgaaggcatttccctaaggaaatgcgtagggaggcagagcctcctccccaaaagtgggaaggggcgggcgagggcggaggaaggcgatcctgagccttctccgcacccccgggaccgaaggcttgggggagagggagggaggaggaggctgagtgtcctagagcggctgaggccggaggcctggtgtccccagcctaagcagagggccccgggggccgggtgggtgggggtctgtctggacgaattgttctgtgtgtgaggtctgagctctgaggcagcagtgttagcacaataaagaaacattgagacgtga

SEQ ID NO: 70 - protein, 414 aa, Homo sapiens
MRVGGAFHLLLVCLSPALLSAVRINGDGQEVLYLAEGDNVRLGCPYVLDPEDYGPNGLDIEWMQVNSDPAHHRENVFLSYQDKRINHGSLPHLQQRVRFAASDPSQYDASINLMNLQVSDTATYECRVKKTTMATRKVIVTVQARPAVPMCWTEGHMTYGNDVVLKCYASGGSQPLSYKWAKISGHHYPYRAGSYTSQHSYHSELSYQESFHSSINQGLNNGDLVLKDISRADDGLYQCTVANNVGYSVCVVEVKVSDSRRIGVIIGIVLGSLLALGCLAVGIWGLVCCCCGGSGAGGARGAFGYGNGGGVGGGACGDLASEIREDAVAPGCKASGRGSRVTHLLGYPTQNVSRSLRRKYAPPPCGGPEDVALAPCTAAAACEAGPSPVYVKVKSAEPADCAEGPVQCKNGLLV

SEQ ID NO: 71 - DNA, 1814 bp, Mus musculus
actcattgcatcttcctgccaccccgggcagtgtctgggccctccgctccccctccctccacctgccccttccacccaccaccaccagcccactggagcccagctcaggcggaggaaagaccaagcctagagacatgggagttcgaggagcactccatcttctacttgtgtgcctgagcccagcactgttgtctgctgtaaggatcaacggggatggccaggaggtcatgtacctggcagaaggtgacaatgtgaggctaggctgtccctacctcctggatcctgaggatttgggtaccaacagtctggacattgagtggatgcaagtcaactcagagccctcacacagggagaatgtttttcttacttatcaagacaagaggataggtcatggcaacctcccccatctgcagcagagggtccgctttgcagcctcagaccccagccagtacgatgcctccatcaacctcatgaacctgcaggtatctgacacagcaacctatgagtgccgggtgaagaagaccaccatggccaccaggaaggtcattgtcactgtccaagcacgtcctgcggtgcccatgtgttggacggaaggccacatgtcaaagggcaacgatgtggtgctgaagtgctttgccaacggaggctctcagcccctctcctacaagtgggccaagatcagtgggcacagtcacccctaccgagctggggcttaccactcacagcacagcttccactctgagctttcttaccaagagtcattccacagcaccatcaaccaaggcctgggcaacggagacctgctgttgaagggcatcaacgcagacgacgatgggctgtatcagtgcacagtggccaaccatgtgggctacagcgtctgtgtggtagaggtgaaagtctcagactcccagcgagtaggcatgatcgttggagcagtgctgggctctttgctcatgctggcctgcctggcactaggcatctgggggctcatctgctgctgctgcggaggcggcggggccggtggtgcccgaggtgccttcggctacggggtcggcggcggggtcggcggaggggcctgcggcgacttggctagtgagatcagagtggacgccgaggcgcccgggtgtaaggccagcgggcgcggcagccgcgtcacccacctcctggggtacccgacgcagaacgtcagccgctccctgcgccgcaagtacgcgcctccgccctgcggcggccccgaggacgtggccctagtgccccgcaccgcctccgcctcctgcgaagcgggtccctcccccgtctacatcaaggtcaagagcgcggagccggccgactgcgccgactgtgcccaggtcgagcagcgctcgtgcaaggacggcctcttagtgtgagcgcacagcaccgggctgcgccccggctgggaggtggttcgggggctctctgcccgcagctggggacaggttcgggccagcagacctggctctctcattggccacctagcggtggtaaggaaatttccctctgagaagccaagccgggcagaccctcctcccctgtagtgggaggagaggcgggggagacagaaaacagttcagagctctccctcacccctggtttccagggagaggaagggagaggagagctgtcggtatcccagaaccgcagaggtacaacccagatgtccccagccaaggcgagggccccccagccctgggtaggtggatgtcagggctgaattgctctgtgtgtgagatctgagctccaaggcaacagtgttagcacaataaagaaacttaaagactgaaaaaaaaaaaaaa

SEQ ID NO: 72 - protein, 417 aa, Mus musculus
MGVRGALHLLLVCLSPALLSAVRINGDGQEVMYLAEGDNVRLGCPYLLDPEDLGTNSLDIEWMQVNSEPSHRENVFLTYQDKRIGHGNLPHLQQRVRFAASDPSQYDASINLMNLQVSDTATYECRVKKTTMATRKVIVTVQARPAVPMCWTEGHMSKGNDVVLKCFANGGSQPLSYKWAKISGHSHPYRAGAYHSQHSFHSELSYQESFHSTINQGLGNGDLLLKGINADDDGLYQCTVANHVGYSVCVVEVKVSDSQRVGMIVGAVLGSLLMLACLALGIWGLICCCCGGGGAGGARGAFGYGVGGGVGGGACGDLASEIRVDAEAPGCKASGRGSRVTHLLGYPTQNVSRSLRRKYAPPPCGGPEDVALVPRTASASCEAGPSPVYIKVKSAEPADCADCAQVEQRSCKDGLLV

SEQ ID NO: 73 - DNA, 3523 bp, Homo sapiens
agtcctggggcagggctgggtggcacggctggcgagcccggaacgcctctggtcacagctcagcgtccgcggagccgggcggcgctgcagctgcacttggctcgtctgtgggtctgacagtcccagctctgcgcggggaacagcggcccggcgctgggtgtgggaggaccaggctgccccaagagcgcggagactcacgcccgctcctctcctgttgcgaccgggagccgggtaggaggcaggcgcgctccctgcggccccgggatgacttctcagcgttcccctctggcgcctttgctgctcctctctctgcacggtgttgcagcatccctggaagtgtcagagagccctgggagtatccaggtggcccggggtcagccagcagtcctgccctgcactttcactaccagcgctgccctcattaacctcaatgtcatttggatggtcactcctctctccaatgccaaccaacctgaacaggtcatcctgtatcagggtggacagatgtttgatggtgccccccggttccacggtagggtaggatttacaggcaccatgccagctaccaatgtctctatcttcattaataacactcagttatcagacactggcacctaccagtgcctggtcaacaaccttccagacatagggggcaggaacattggggtcaccggtctcacagtgttagttcccccttctgccccacactgccaaatccaaggatcccaggatattggcagcgatgtcatcctgctctgtagctcagaggaaggcattcctcgaccaacttacctttgggagaagttagacaataccctcaaactacctccaacagctactcaggaccaggtccagggaacagtcaccatccggaacatcagtgccctgtcttcaggtttgtaccagtgcgtggcttctaatgctattggaaccagcacctgtcttctggatctccaggttatttcaccccagcccaggaacattggactaatagctggagccattggcactggtgcagttattatcattttttgcattgcactaattttaggggcattcttttactggagaagcaaaaataaagaggaggaagaagaagaaattcctaatgaaataagagaggatgatcttccacccaagtgttcttctgccaaagcatttcacactgagatttcctcctcggacaacaacacactaacctcttccaatgcctacaacagtcgatactggagcaacaatccaaaagttcatagaaacacagagtcagtcagccacttcagtgacttgggccaatctttctctttccactcaggcaatgccaacataccatccatttatgctaatgggacccatctggtcccgggtcaacataagactctggtagtgacagccaacagagggtcatcaccacaggtgatgtccaggagcaatggctcagtcagtaggaagcctcggcctccacacactcattcctacaccatcagccacgcaacactggaacgaattggtgcagtacctgtcatggtaccagcccagagtcgggccgggtccttggtataggacatgaggaaatgttgtgttcagaaatgaataaatggaatgccctcatacaagggggagggtggggtggggagtgctgggaaagaaacacttccttataattatattagtaaaatgcacaaagaagaaggcagtgctgttacttggccactaagatgtgtaaaatggactgaaatgctccatcatgaagacttgcttccccaccaaagatgtcctgggattctgctggatctcaaagatgtgccaagccaaggaaaaagatacaagagcagaatagtacttaaaatccaaactgccgcccagatgggcttgttcttcatgcctaacttaataatttttaagagattaaagtgccagatggagtttaaatattgaaattattttaaaaggtaggtgtctttaagaaaataacaagcaaccctgtgatatgttccgtctctcccaattccctcgttatatagagggcttaatggtataaatggttaatattggtcccaacagggctgactcttctatcatataatcaaaactttttacatgagcaaaattcagtaagaaatgggggaagacaaaggaaacgtctttgagaagccccttcatatttatttatttatctcttcctgaaccatgaatttcatatgtggaatattgctatattgacagattcttgcctgtctgtgttattctaggatctgttacaggtccatggcaattactgtttattttttcctggaaaaatatttttttataaaaggcttttttttttttttaaatacatgagaggcattgggctaagaaagaaaagactgttgtataataccttgttcaatggttgtatttagtgagctcatagaggtccatcatatcatgaccgagctaggttgtgtgggcaggaaggtagggctaaggggttgtagccttgctgggcagcctctcagagcaaggttgttcagatctcccttgctattacagtaggttactattaatgagggcagcacctgatgccttttgtactgaggtatgtaactttctccttatttgacaagtagaagttaacttacttgtcagggagggcagacgtttttttgttctgtttcgtttttcaaaataatgctttttgcaaaagaggtaagactgagactaaaggtgttatcttctggtgtgctcctggaagtgtctaccctacatttgtgtcagctcagggttgcagtgttgcccagatgcattttacatcactgtaaagagattacttttgtggttactacctggcttggctggccttgcggttcaccagattaatttacaaactcccccactttattttgtgctatgtagatctggccatacttgcattagtgactgtcttgccttaaccacacttaagcaacccacaaatttcttctcagatttgtttcctagattacttatgatactcatcccatgtctcaataagagtgtcttttctttctggatgtgttctcttactccctcttaccaccatactttttgctctcttctcctgcaagcgtagtcttcacagggagtggcttcctgacatttttttcagttatgtgaatgaatggaaaccaacagctgctgcaaacactgtttttccaagaaggctacactcagaacctaaccattgccaaccatttcagtattgataaaaagctgaatttactttagcattacttatttttttttccatttgatggttcttactttgtaaaaatttaaataaatgaatgtctatactttttataaagaaaagtgaaaataccatgacactgaaaagatgatgctatcagatgctgtttagaaagcatttatcttgcatttctttattctttctaattatctaaaattcaataaaattttattcatataaaataagttgtcattaattatcaatactaacgagtatgtcattttaaaacttagtattctctttaatgttacaaga

SEQ ID NO: 74 - protein, 431 aa, Homo sapiens
MTSQRSPLAPLLLLSLHGVAASLEVSESPGSIQVARGQPAVLPCTFTTSAALINLNVIWMVTPLSNANQPEQVILYQGGQMFDGAPRFHGRVGFTGTMPATNVSIFINNTQLSDTGTYQCLVNNLPDIGGRNIGVTGLTVLVPPSAPHCQIQGSQDIGSDVILLCSSEEGIPRPTYLWEKLDNTLKLPPTATQDQVQGTVTIRNISALSSGLYQCVASNAIGTSTCLLDLQVISPQPRNIGLIAGAIGTGAVIIIFCIALILGAFFYWRSKNKEEEEEEIPNEIREDDLPPKCSSAKAFHTEISSSDNNTLTSSNAYNSRYWSNNPKVHRNTESVSHFSDLGQSFSFHSGNANIPSIYANGTHLVPGQHKTLVVTANRGSSPQVMSRSNGSVSRKPRPPHTHSYTISHATLERIGAVPVMVPAQSRAGSLV

SEQ ID NO: 75 - DNA, 3430 bp, Mus musculus
cggctggtggtggccgcggcggccggcgagcccgggacgcccgagcctgccccgagcctcggcggagcggagtggcctcggcgctcccgtgtcccgcttggtcccacgctgcaccccgccgcccaggagcccggcggacggcggctcccccggcggctccggcatgactcggcggcgctccgctccggcgtcctggctgctcgtgtcgctgctcggtgtcgcaacatccctggaagtgtccgagagcccaggcagtgtccaggtggcccggggccagacagcagtcctgccctgcgccttctccaccagtgctgccctcctgaacctcaatgtcatttggatggtcattcccctctccaatgcaaaccagcccgaacaggtcattctttatcagggtggacaaatgtttgacggcgccctccggttccacgggagggtaggatttaccggcaccatgcctgctaccaatgtctcgatcttcatcaataacacacagctgtcagatacgggcacgtaccagtgcttggtgaataaccttccagacagagggggcagaaacatcggggtcactggcctcacagtgttagtccccccttctgctccacaatgccaaatccaaggatcccaggacctcggcagtgacgtcatccttctgtgtagttcagaggaaggcatccctcggcccacgtacctttgggagaagttagataatacgctcaagctacctccaacagccactcaggaccaggtccagggaacagtcaccatccggaatatcagtgccctctcttccggtctgtaccagtgtgtggcttctaatgccatcgggaccagcacctgtctgctggacctccaggttatctcaccccagccccggagcgttggagtaatagccggagcggttggcaccggtgctgttcttatcgtcatctgccttgcactaatttcaggggcgttcttttactggagaagcaaaaacaaagaggaggaggaggaagaaattcctaatgaaatcagagaggatgatcttccccctaaatgctcttctgccaaagccttccacacggagatatcctcctcagaaaataacacgctgacctcttccaatacctacaacagtcgatactggaacaacaatccaaaaccccatagaaacacagagtctttcaaccacttcagtgacttacgccagtctttctctggcaatgcagttatcccatcaatctatgcaaatgggaaccatctggttttgggtccacataagactctggtagttacagccaacagagggtcatcacctcaggtcttgcccaggaacaatggttcagtcagcaggaagccttggcctcaacacactcattcctacacagtaagccaaatgaccctggagcgcatcggtgcagtgcctgtcatggtgcctgcccagagtcgagcagggtccctggtataggatgactgaggaaaccatgttcagaagagaataaatggaccgccttcaggcaaggggggagcactgccttcaggcaaggggggagcactgccttcaggcaagagggagagtgggatgggtgagtgctgaaaaataaacttttgttacgattccattagcaaaaagcacaaagaggaggcgtgtgtgaagtggcctggggttgttccataatgaagactcaagaagactgtttccccaccacagatgtcctgagattcagttaaaacgaaacatgctgcatctccagagatgtgccaagccaaggagaatgctagaagcagagtaaagcttaccccccaaactgtggtccagctggaccccttctttaattcttgcctaacttaattattttcaggacccttcaagtgccaggtggaatttacataatgaaattattttttaaaaataggtgtccttagggagagaaaacaggagcaagctcatggtctggcctagtctccctctcccactccttctgatgacactagcaatgcattccatctgacctgactttatcatagaggcaaaattgttcagaacactggctggagatggggagaaataaggaaacttcttgtgaacaccctacacacacacacacacacacacacacacacacacacacacacacacacacacacacacacacatttatttacctcctcctgaaccatgaatcgtattggtgattttgctatattgacagattctcatctgttacactctaggatctctcacaggtctgtggcaattactgttcatgatttcctgaaaaaatatttttttaaaagaaaactattttttttaaatactagagagacagtggactaggaaagcgagaacttgccgccttgtctagtgactgtattcaatgactgaacagaggccccccccaccatacaagagttttaggtgattgagtgggtggaaccagctggagccaggtgggaggggcctttacattgccagcagggccccaaagaattgagattgtgtatggcaaccgttaatgaggacagcgcctgatgccttttgtaccgaggaagataattgcctcttgtttgacaagtagagtttagtaggttattacaaaaagggcaagagttgttttggttttgtttctttcaaaataattttttttcaaaagaataacaagggttaggcaaatgggggaccttcctgtgtgctcttgggggtctgctcagcatctggaaatttgggtgtgcgattttccctgaacacattgcataccagtgtaaaaagactctgcctcccccctttttggcttttttactgggcttggctggccttgcagtttaccagattcatttacagactctctgctctgtatggcgccgcctgccatgtctgtcttggtgactatcctgccttaatcactttgctttagggcaactcatggtgatctcttccaagatctgtttttaaattgtttggactacttgagccacaactctcagaggacattcctttttttttttttttttttttctcctttcttccattgctttgtccctcttcccctgtgcttcctgccttctttccctgtcccatgggcacagtcctcacagggagtggcctcctctctccagtgatgtaagtgaatggaagccatcactggctgcacatacctttttcaaaagggacactcgggaagtcactgctgtgaccgtttcgatgttgataagaaggtgaatttactgtagtgttaccaccttctccccacttgatggttcttgactttgtaaaaatttaaataaatgaatgtctatactttttaaggaaaagagaaaataccatgtcacagaaaaggtgaaactattagatgctgtttagaaagcatttatcttgcatttctttattctttctaattacctaaaattcaataaaagtttattcatataaaaaaaaaaaaaaaaaaaa

SEQ ID NO: 76 - protein, 428 aa, Mus musculus
MTRRRSAPASWLLVSLLGVATSLEVSESPGSVQVARGQTAVLPCAFSTSAALLNLNVIWMVIPLSNANQPEQVILYQGGQMFDGALRFHGRVGFTGTMPATNVSIFINNTQLSDTGTYQCLVNNLPDRGGRNIGVTGLTVLVPPSAPQCQIQGSQDLGSDVILLCSSEEGIPRPTYLWEKLDNTLKLPPTATQDQVQGTVTIRNISALSSGLYQCVASNAIGTSTCLLDLQVISPQPRSVGVIAGAVGTGAVLIVICLALISGAFFYWRSKNKEEEEEEIPNEIREDDLPPKCSSAKAFHTEISSSENNTLTSSNTYNSRYWNNNPKPHRNTESFNHFSDLRQSFSGNAVIPSIYANGNHLVLGPHKTLVVTANRGSSPQVLPRNNGSVSRKPWPQHTHSYTVSQMTLERIGAVPVMVPAQSRAGSLV

SEQ ID NO: 77 - DNA, 1807 bp, Homo sapiens
acagacgctggcggccaccagaagtttgagcctctttggtagcaggaggctggaagaaaggacagaagtagctctggctgtgatggggatcttactgggcctgctactcctggggcacctaacagtggacacttatggccgtcccatcctggaagtgccagagagtgtaacaggaccttggaaaggggatgtgaatcttccctgcacctatgaccccctgcaaggctacacccaagtcttggtgaagtggctggtacaacgtggctcagaccctgtcaccatctttctacgtgactcttctggagaccatatccagcaggcaaagtaccagggccgcctgcatgtgagccacaaggttccaggagatgtatccctccaattgagcaccctggagatggatgaccggagccactacacgtgtgaagtcacctggcagactcctgatggcaaccaagtcgtgagagataagattactgagctccgtgtccagaaactctctgtctccaagcccacagtgacaactggcagcggttatggcttcacggtgccccagggaatgaggattagccttcaatgccaggctcggggttctcctcccatcagttatatttggtataagcaacagactaataaccaggaacccatcaaagtagcaaccctaagtaccttactcttcaagcctgcggtgatagccgactcaggctcctatttctgcactgccaagggccaggttggctctgagcagcacagcgacattgtgaagtttgtggtcaaagactcctcaaagctactcaagaccaagactgaggcacctacaaccatgacataccccttgaaagcaacatctacagtgaagcagtcctgggactggaccactgacatggatggctaccttggagagaccagtgctgggccaggaaagagcctgcctgtctttgccatcatcctcatcatctccttgtgctgtatggtggtttttaccatggcctatatcatgctctgtcggaagacatcccaacaagagcatgtctacgaagcagccagggcacatgccagagaggccaacgactctggagaaaccatgagggtggccatcttcgcaagtggctgctccagtgatgagccaacttcccagaatctgggcaacaactactctgatgagccctgcataggacaggagtaccagatcatcgcccagatcaatggcaactacgcccgcctgctggacacagttcctctggattatgagtttctggccactgagggcaaaagtgtctgttaaaaatgccccattaggccaggatctgctgacataattgcctagtcagtccttgccttctgcatggccttcttccctgctacctctcttcctggatagcccaaagtgtccgcctaccaacactggagccgctgggagtcactggctttgccctggaatttgccagatgcatctcaagtaagccagctgctggatttggctctgggcccttctagtatctctgccgggggcttctggtactcctctctaaataccagagggaagatgcccatagcactaggacttggtcatcatgcctacagacactattcaactttggcatcttgccaccagaagacccgagggaggctcagctctgccagctcagaggaccagctatatccaggatcatttctctttcttcagggccagacagcttttaattgaaattgttatttcacaggccagggttcagttctgctcctccactataagtctaatgttctgactctctcctggtgctcaataaatatctaatcataacagcaa

SEQ ID NO: 78 - protein, 399 aa, Homo sapiens
MGILLGLLLLGHLTVDTYGRPILEVPESVTGPWKGDVNLPCTYDPLQGYTQVLVKWLVQRGSDPVTIFLRDSSGDHIQQAKYQGRLHVSHKVPGDVSLQLSTLEMDDRSHYTCEVTWQTPDGNQVVRDKITELRVQKLSVSKPTVTTGSGYGFTVPQGMRISLQCQARGSPPISYIWYKQQTNNQEPIKVATLSTLLFKPAVIADSGSYFCTAKGQVGSEQHSDIVKFVVKDSSKLLKTKTEAPTTMTYPLKATSTVKQSWDWTTDMDGYLGETSAGPGKSLPVFAIILIISLCCMVVFTMAYIMLCRKTSQQEHVYEAARAHAREANDSGETMRVAIFASGCSSDEPTSQNLGNNYSDEPCIGQEYQIIAQINGNYARLLDTVPLDYEFLATEGKSVC

SEQ ID NO: 79 - DNA, 1434 bp, Mus musculus
agctaccagcacttccaggttcttcagcagcaagaggatggaaggatgaatagaagtagcttcaaataggatggagatctcatcaggcttgctgttcctgggccacctaatagtgctcacctatggccaccccaccctaaaaacacctgagagtgtgacagggacctggaaaggagatgtgaagattcagtgcatctatgatcccctgagaggctacaggcaagttttggtgaaatggctggtaagacacggctctgactccgtcaccatcttcctacgtgactccactggagaccatatccagcaggcaaagtacagaggccgcctgaaagtgagccacaaagttccaggagatgtgtccctccaaataaataccctgcagatggatgacaggaatcactatacatgtgaggtcacctggcagactcctgatggaaaccaagtaataagagataagatcattgagctccgtgttcggaaatataatccacctagaatcaatactgaagcacctacaaccctgcactcctctttggaagcaacaactataatgagttcaacctctgacttgaccactaatgggactggaaaacttgaggagaccattgctggttcagggaggaacctgccaatctttgccataatcttcatcatctccctttgctgcatagtagctgtcaccataccttatatcttgttccgctgcaggacattccaacaagagtatgtctatggagtgagcagggtgtttgccaggaagacaagcaactctgaagaaaccacaagggtgactaccatcgcaactgatgaaccagattcccaggctctgattagtgactactctgatgatccttgcctcagccaggagtaccaaataaccatcagatcaacaatgtctattcctgcctgctgaacacagtttccagaaactaagaagttcttgctactgaagaaaataacatctgctaaaatgcccctactaagtcaaggtctactggcgtaattacctgttacttatttactacttgccttcaacatagctttctccctggcttcctttcttcttagacaacctaaagtatctatctagtctgccaattctggggccattgagaaatcctgggtttggctaagaatatactacatgcacctcaagaaatctagcttctgggcttcacccagaacaattttcttcctagggccttcacaactcttctccaaacagcagagaaattccatagcagtagaggttctttatcatgcctccagacagcgtgagtctcagtcctacaaactcagacaagcacatgggtctaggattactcctctttctctagggccagatgacttttaattgatattactattgctacattatgaatctaatgcacatgtattcttttgttgttaataaatgtttaatcatgacatcaa

SEQ ID NO: 80 - protein, 280 aa, Mus musculus
MEISSGLLFLGHLIVLTYGHPTLKTPESVTGTWKGDVKIQCIYDPLRGYRQVLVKWLVRHGSDSVTIFLRDSTGDHIQQAKYRGRLKVSHKVPGDVSLQINTLQMDDRNHYTCEVTWQTPDGNQVIRDKIIELRVRKYNPPRINTEAPTTLHSSLEATTIMSSTSDLTTNGTGKLEETIAGSGRNLPIFAIIFIISLCCIVAVTIPYILFRCRTFQQEYVYGVSRVFARKTSNSEETTRVTTIATDEPDSQALISDYSDDPCLSQEYQITIRSTMSIPAC

SEQ ID NO: 81 - DNA, 2237 bp, Homo sapiens
atttggagagttaaaactgtgcctaacagaggtgtcctctgacttttcttctgcaagctccatgttttcacatcttccctttgactgtgtcctgctgctgctgctgctactacttacaaggtcctcagaagtggaatacagagcggaggtcggtcagaatgcctatctgccctgcttctacaccccagccgccccagggaacctcgtgcccgtctgctggggcaaaggagcctgtcctgtgtttgaatgtggcaacgtggtgctcaggactgatgaaagggatgtgaattattggacatccagatactggctaaatggggatttccgcaaaggagatgtgtccctgaccatagagaatgtgactctagcagacagtgggatctactgctgccggatccaaatcccaggcataatgaatgatgaaaaatttaacctgaagttggtcatcaaaccagccaaggtcacccctgcaccgactcggcagagagacttcactgcagcctttccaaggatgcttaccaccaggggacatggcccagcagagacacagacactggggagcctccctgatataaatctaacacaaatatccacattggccaatgagttacgggactctagattggccaatgacttacgggactctggagcaaccatcagaataggcatctacatcggagcagggatctgtgctgggctggctctggctcttatcttcggcgctttaattttcaaatggtattctcatagcaaagagaagatacagaatttaagcctcatctctttggccaacctccctccctcaggattggcaaatgcagtagcagagggaattcgctcagaagaaaacatctataccattgaagagaacgtatatgaagtggaggagcccaatgagtattattgctatgtcagcagcaggcagcaaccctcacaacctttgggttgtcgctttgcaatgccatagatccaaccaccttatttttgagcttggtgttttgtctttttcagaaactatgagctgtgtcacctgactggttttggaggttctgtccactgctatggagcagagttttcccattttcagaagataatgactcacatgggaattgaactgggacctgcactgaacttaaacaggcatgtcattgcctctgtatttaagccaacagagttacccaacccagagactgttaatcatggatgttagagctcaaacgggcttttatatacactaggaattcttgacgtggggtctctggagctccaggaaattcgggcacatcatatgtccatgaaacttcagataaactagggaaaactgggtgctgaggtgaaagcataacttttttggcacagaaagtctaaaggggccactgattttcaaagagatctgtgatccctttttgttttttgtttttgagatggagtcttgctctgttgcccaggctggagtgcaatggcacaatctcggctcactgcaagctccgcctcctgggttcaagcgattctcctgcctcagcctcctgagtggctgggattacaggcatgcaccaccatgcccagctaatttgttgtatttttagtagagacagggtttcaccatgttggccagtgtggtctcaaactcctgacctcatgatttgcctgcctcggcctcccaaagcactgggattacaggcgtgagccaccacatccagccagtgatccttaaaagattaagagatgactggaccaggtctaccttgatcttgaagattcccttggaatgttgagatttaggcttatttgagcactgcctgcccaactgtcagtgccagtgcatagcccttcttttgtctcccttatgaagactgccctgcagggctgagatgtggcaggagctcccagggaaaaacgaagtgcatttgattggtgtgtattggccaagttttgcttgttgtgtgcttgaaagaaaatatctctgaccaacttctgtattcgtggaccaaactgaagctatatttttcacagaagaagaagcagtgacggggacacaaattctgttgcctggtggaaagaaggcaaaggccttcagcaatctatattaccagcgctggatcctttgacagagagtggtccctaaacttaaatttcaagacggtataggcttgatctgtcttgcttattgttgccccctgcgcctagcacaattctgacacacaattggaacttactaaaaatttttttttactgtt

SEQ ID NO: 82 - protein, 301 aa, Homo sapiens
MFSHLPFDCVLLLLLLLLTRSSEVEYRAEVGQNAYLPCFYTPAAPGNLVPVCWGKGACPVFECGNVVLRTDERDVNYWTSRYWLNGDFRKGDVSLTIENVTLADSGIYCCRIQIPGIMNDEKFNLKLVIKPAKVTPAPTRQRDFTAAFPRMLTTRGHGPAETQTLGSLPDINLTQISTLANELRDSRLANDLRDSGATIRIGIYIGAGICAGLALALIFGALIFKWYSHSKEKIQNLSLISLANLPPSGLANAVAEGIRSEENIYTIEENVYEVEEPNEYYCYVSSRQQPSQPLGCRFAMP

SEQ ID NO: 83 - DNA, 2725 bp, Mus musculus
accattttaaccgaggagctaaagctatccctacacagagctgtccttggatttcccctgccaagtactcatgttttcaggtcttaccctcaactgtgtcctgctgctgctgcaactactacttgcaaggtcattggaaaatgcttatgtgtttgaggttggtaagaatgcctatctgccctgcagttacactctatctacacctggggcacttgtgcctatgtgctggggcaagggattctgtccttggtcacagtgtaccaacgagttgctcagaactgatgaaagaaatgtgacatatcagaaatccagcagataccagctaaagggcgatctcaacaaaggagacgtgtctctgatcataaagaatgtgactctggatgaccatgggacctactgctgcaggatacagttccctggtcttatgaatgataaaaaattagaactgaaattagacatcaaagcagccaaggtcactccagctcagactgcccatggggactctactacagcttctccaagaaccctaaccacggagagaaatggttcagagacacagacactggtgaccctccataataacaatggaacaaaaatttccacatgggctgatgaaattaaggactctggagaaacgatcagaactgctatccacattggagtgggagtctctgctgggttgaccctggcacttatcattggtgtcttaatccttaaatggtattcctgtaagaaaaagaagttatcgagtttgagccttattacactggccaacttgcctccaggagggttggcaaatgcaggagcagtcaggattcgctctgaggaaaatatctacaccatcgaggagaacgtatatgaagtggagaattcaaatgagtactactgctacgtcaacagccagcagccatcctgaccgcctctggactgccacttttaaaggctcgccttcatttctgactttggtatttccctttttgaaaactatgtgatatgtcacttggcaacctcattggaggttctgaccacagccactgagaaaagagttccagttttctggggataattaactcacaaggggattcgactgtaactcatgctacattgaaatgctccattttatccctgagtttcagggatcggatctcccactccagagacttcaatcatgcgtgttgaagctcactcgtgctttcatacattaggaatggttagtgtgatgtctttgagacatagaggtttgtggtatatctgcaaagctcctgaacaggtagggggaataaagggctaagataggaaggtgaggttctttgttgatgttgaaaatctaaagaagttggtagcttttctagagatttctgaccttgaaagattaagaaaaagccaggtggcatatgcttaacactatataacttgggaaccttaggcaggagggtgataagttcaaggtcagccagggctatgctggtaagactgtctcaaaatccaaagacgaaaataaacatagagacagcaggaggctggagatgaggctcggacagtgaggtgcattttgtacaagcacgaggaatctatatttgatcgtagaccccacatgaaaaagctaggcctggtagagcatgcttgtagactcaagagatggagaggtaaaggcacaacagatccccggggcttgcgtgcagtcagcttagcctaggtgctgagttccaagtccacaagagtccctgtctcaaagtaagatggactgagtatctggcgaatgtccatgggggttgtcctctgctctcagaagagacatgcacatgaacctgcacacacacacacacacacacacacacacacacacacacacacacacacacacacatgaaatgaaggttctctctgtgcctgctacctctctataacatgtatctctacaggactctcctctgcctctgttaagacatgagtgggagcatggcagagcagtccagtaattaattccagcactcagaaggctggagcagaagcgtggagagttcaggagcactgtgcccaacactgccagactcttcttacagaagaaaaaggttacccgcaagcagcctgctgtctgtaaaaggaaaccctgcgaaaggcaaactttgactgttgtgtgctcaaggggaactgactcagacaacttctccattcctggaggaaactggagctgtttctgacagaagaacaaccggtgactgggacatacgaaggcagagctcttgcagcaatctatatagtcagcaaaatattctttgggaggacagtcgtcaccaaattgatttccaagccggtggacctcagtttcatctggcttacagctgcctgcccagtgcccttgatctgtgctggctcccatctataacagaatcaaattaaatagaccccgagtgaaaatattaagtgagcagaaaggtagctttgttcaaagatttttttgcattggggagcaactgtgtacatcagaggacatctgttagtgaggacaccaaaacctgtggtaccgttttttcatgtatgaattttgttgtttaggttgcttctagctagctgtggaggtcctggctttcttaggtgggtatggaagggagaccatctaacaaaatccattagagataacagctctcatgcagaagggaaaactaatctcaaatgttttaaagtaataaaactgtactggcaaagtactttgagcatatttaaa

SEQ ID NO: 84 - protein, 281 aa, Mus musculus
MFSGLTLNCVLLLLQLLLARSLENAYVFEVGKNAYLPCSYTLSTPGALVPMCWGKGFCPWSQCTNELLRTDERNVTYQKSSRYQLKGDLNKGDVSLIIKNVTLDDHGTYCCRIQFPGLMNDKKLELKLDIKAAKVTPAQTAHGDSTTASPRTLTTERNGSETQTLVTLHNNNGTKISTWADEIKDSGETIRTAIHIGVGVSAGLTLALIIGVLILKWYSCKKKKLSSLSLITLANLPPGGLANAGAVRIRSEENIYTIEENVYEVENSNEYYCYVNSQQPS

SEQ ID NO: 85 - DNA, 1330 bp, Homo sapiens
agactcctgggtccggtcaaccgtcaaaatgtccaaagaacctctcattctctggctgatgattgagttttggtggctttacctgacaccagtcacttcagagactgttgtgacggaggttttgggtcaccgggtgactttgccctgtctgtactcatcctggtctcacaacagcaacagcatgtgctgggggaaagaccagtgcccctactccggttgcaaggaggcgctcatccgcactgatggaatgagggtgacctcaagaaagtcagcaaaatatagacttcaggggactatcccgagaggtgatgtctccttgaccatcttaaaccccagtgaaagtgacagcggtgtgtactgctgccgcatagaagtgcctggctggttcaacgatgtaaagataaacgtgcgcctgaatctacagagagcctcaacaaccacgcacagaacagcaaccaccaccacacgcagaacaacaacaacaagccccaccaccacccgacaaatgacaacaaccccagctgcacttccaacaacagtcgtgaccacacccgatctcacaaccggaacaccactccagatgacaaccattgccgtcttcacaacagcaaacacgtgcctttcactaaccccaagcacccttccggaggaagccacaggtcttctgactcccgagccttctaaggaagggcccatcctcactgcagaatcagaaactgtcctccccagtgattcctggagtagtgttgagtctacttctgctgacactgtcctgctgacatccaaagagtccaaagtttgggatctcccatcaacatcccacgtgtcaatgtggaaaacgagtgattctgtgtcttctcctcagcctggagcatctgatacagcagttcctgagcagaacaaaacaacaaaaacaggacagatggatggaatacccatgtcaatgaagaatgaaatgcccatctcccaactactgatgatcatcgccccctccttgggatttgtgctcttcgcattgtttgtggcgtttctcctgagagggaaactcatggaaacctattgttcgcagaaacacacaaggctagactacattggagatagtaaaaatgtcctcaatgacgtgcagcatggaagggaagacgaagacggcctttttaccctctaacaacgcagtagcatgttagattgaggatgggggcatgacactccagtgtcaaaataagtcttagtagatttccttgtttcataaaaaagactcacttattccatggatgtcattgatccaggcttgctttagtttcatgaatgaagggtactttagagaccacaa

SEQ ID NO: 86 - protein, 378 aa, Homo sapiens
MSKEPLILWLMIEFWWLYLTPVTSETVVTEVLGHRVTLPCLYSSWSHNSNSMCWGKDQCPYSGCKEALIRTDGMRVTSRKSAKYRLQGTIPRGDVSLTILNPSESDSGVYCCRIEVPGWFNDVKINVRLNLQRASTTTHRTATTTTRRTTTTSPTTTRQMTTTPAALPTTVVTTPDLTTGTPLQMTTIAVFTTANTCLSLTPSTLPEEATGLLTPEPSKEGPILTAESETVLPSDSWSSVESTSADTVLLTSKESKVWDLPSTSHVSMWKTSDSVSSPQPGASDTAVPEQNKTTKTGQMDGIPMSMKNEMPISQLLMIIAPSLGFVLFALFVAFLLRGKLMETYCSQKHTRLDYIGDSKNVLNDVQHGREDEDGLFTL

SEQ ID NO: 87 - DNA, 2175 bp, Mus musculus
agatcctatcaaaatgtccaaggggcttctcctcctctggctggtgacggagctctggtggctttatctgacaccagctgcctcagaggatacaataatagggtttttgggccagccggtgactttgccttgtcattacctctcgtggtcccagagccgcaacagtatgtgctggggcaaaggttcatgtcccaattccaagtgcaatgcagagcttctccgtacagatggaacaagaatcatctccaggaagtcaacaaaatatacacttttggggaaggtccagtttggtgaagtgtccttgaccatctcaaacaccaatcgaggtgacagtggggtgtactgctgccgtatagaggtgcctggctggttcaatgatgtcaagaagaatgtgcgcttggagctgaggagagccacaacaaccaaaaaaccaacaacaaccacccggccaaccaccaccccttatgtgaccaccaccaccccagagctgcttccaacaacagtcatgaccacatctgttctcccaaccaccacaccaccccagacactagccaccactgccttcagtacagcagtgaccacgtgcccctcaacaacacctggctccttctcacaagaaaccacaaaagggtccgccttcactacagaatcagaaactctgcctgcatccaatcactctcaaagaagcatgatgaccatatctacagacatagccgtactcaggcccacaggctctaaccctgggattctcccatccacttcacagctgacgacacagaaaacaacattaacaacaagtgagtctttgcagaagacaactaaatcacatcagatcaacagcagacagaccatcttgatcattgcctgctgtgtgggatttgtgctaatggtgttattgtttctggcgtttctccttcgagggaaagtcacaggagccaactgtttgcagagacacaagaggccagacaacactgaagatagtgacagcgtcctcaatgacatgtcacacgggagggatgatgaagacgggatcttcactctctgactcaccatctttatttaggattaaggatagggaatggcacttgaattgtcaaaataagtttggggacattgtaatttccgtttaaagtctcactctgtttactgatgctgtgggtcctgtctggttgtatcttcccacatgaaggtgctttagagacacattttccctgcctcgtgccttagtcctctttgttgttttgtggctaggtgacttttcacactgggcttgaacactgtcagtgatggtgaaatccttgccacagctttgggagtctcttgcagtctcccagcagtagagggagttagaaatatccagaggggaaaaaaaaatctctcttttcagacagtatctgctttattggtggtagctgaacttcatttatacagagctcctttaacctgtctgtcttcttcttggtatctaagctgccttttgtttttgtttttgtttttgtttttatgatattaacttcttttcacattcaagtttctttaaagttgactatagtgccttctgaactcttgcagagagtttggattttggaagctgccaggtacccatcacagcaggggtgccagtgacaaggatggtgtacaaatgaaacactgaagctatccaaataaattcctctaagtgtaattcattttactgcagcacaggaagaacaaatttgtcttacaactttaataattagtaccattatgaaccctaggagagaaataagagcaaatacctgttgaataaatgaatgtaagaaaatgtgtgtctgagcaagaatactctgtctggctactatgggaagctagctagatctgaaagacattctcagactatcctcatgttcaaggcattaaaggaataagcctccagcccctaaccttaggagaattctgcagtcaagtgaggagtttttaaaacaggaatctctaggttccagtcctctagctattcttttatgcttagtccaggtaatgagttgaacatccaagtattttttaaggacccaaagaaatgcaaccagagctattaccagaattttggagtggtcctcctagagttgccgcatgttgctgggaaaattggggtcttagagttcttagtctacttaataaaagaattttaaaaaatgg

SEQ ID NO: 88 - protein, 343 aa, Mus musculus
MSKGLLLLWLVTELWWLYLTPAASEDTIIGFLGQPVTLPCHYLSWSQSRNSMCWGKGSCPNSKCNAELLRTDGTRIISRKSTKYTLLGKVQFGEVSLTISNTNRGDSGVYCCRIEVPGWFNDVKKNVRLELRRATTTKKPTTTTRPTTTPYVTTTTPELLPTTVMTTSVLPTTTPPQTLATTAFSTAVTTCPSTTPGSFSQETTKGSAFTTESETLPASNHSQRSMMTISTDIAVLRPTGSNPGILPSTSQLTTQKTTLTTSESLQKTTKSHQINSRQTILIIACCVGFVLMVLLFLAFLLRGKVTGANCLQRHKRPDNTEDSDSVLNDMSHGRDDEDGIFTL

SEQ ID NO: 89 - DNA, 3491 bp, Homo sapiens
agcacagagagtggaaaacagcagaggtgacagagcagccgtgctcgaagcgttcctggagcccaagctctcctccacaggtgaagacagggccagcaggagacaccatggggcacctctcagccccacttcacagagtgcgtgtaccctggcaggggcttctgctcacagcctcacttctaaccttctggaacccgcccaccactgcccagctcactactgaatccatgccattcaatgttgcagaggggaaggaggttcttctccttgtccacaatctgccccagcaactttttggctacagctggtacaaaggggaaagagtggatggcaaccgtcaaattgtaggatatgcaataggaactcaacaagctaccccagggcccgcaaacagcggtcgagagacaatataccccaatgcatccctgctgatccagaacgtcacccagaatgacacaggattctacaccctacaagtcataaagtcagatcttgtgaatgaagaagcaactggacagttccatgtatacccggagctgcccaagccctccatctccagcaacaactccaaccctgtggaggacaaggatgctgtggccttcacctgtgaacctgagactcaggacacaacctacctgtggtggataaacaatcagagcctcccggtcagtcccaggctgcagctgtccaatggcaacaggaccctcactctactcagtgtcacaaggaatgacacaggaccctatgagtgtgaaatacagaacccagtgagtgcgaaccgcagtgacccagtcaccttgaatgtcacctatggcccggacacccccaccatttccccttcagacacctattaccgtccaggggcaaacctcagcctctcctgctatgcagcctctaacccacctgcacagtactcctggcttatcaatggaacattccagcaaagcacacaagagctctttatccctaacatcactgtgaataatagtggatcctatacctgccacgccaataactcagtcactggctgcaacaggaccacagtcaagacgatcatagtcactgagctaagtccagtagtagcaaagccccaaatcaaagccagcaagaccacagtcacaggagataaggactctgtgaacctgacctgctccacaaatgacactggaatctccatccgttggttcttcaaaaaccagagtctcccgtcctcggagaggatgaagctgtcccagggcaacaccaccctcagcataaaccctgtcaagagggaggatgctgggacgtattggtgtgaggtcttcaacccaatcagtaagaaccaaagcgaccccatcatgctgaacgtaaactataatgctctaccacaagaaaatggcctctcacctggggccattgctggcattgtgattggagtagtggccctggttgctctgatagcagtagccctggcatgttttctgcatttcgggaagaccggcagggcaagcgaccagcgtgatctcacagagcacaaaccctcagtctccaaccacactcaggaccactccaatgacccacctaacaagatgaatgaagttacttattctaccctgaactttgaagcccagcaacccacacaaccaacttcagcctccccatccctaacagccacagaaataatttattcagaagtaaaaaagcagtaatgaaacctgtcctgctcactgcagtgctgatgtatttcaagtctctcaccctcatcactaggagattcctttcccctgtaggggtagaggggtggggacagaaacaactttctcctactcttccttcctaataggcatctccaggctgcctggtcactgcccctctctcagtgtcaatagatgaaagtacattgggagtctgtaggaaacccaaccttcttgtcattgaaatttggcaaagctgactttgggaaagagggaccagaacttcccctcccttccccttttcccaacctggacttgttttaaacttgcctgttcagagcactcattccttcccacccccagtcctgtcctatcactctaattcggatttgccatagccttgaggttatgtccttttccattaagtacatgtgccaggaaacaagagagagagaaagtaaaggcagtaatgccttctcctatttctccaaagccttgtgtgaactcaccaaacacaagaaaatcaaatatataaccaatagtgaaatgccacacctttgtccactgtcagggttgtctacctgtaggatcagggtctaagcaccttggtgcttagctagaataccacctaatccttctggcaagcctgtcttcagagaacccactagaagcaactaggaaaatcacttgccaaaatccaaggcaattcctgatggaaaatgcaaaagcacatatatgttttaatatctttatgggctctgttcaaggcagtgctgagagggaggggttatagcttcaggagggaaccagcttctgataaacacaatctgctaggaacttgggaaaggaatcagagagctgcccttcagcgattatttaaattattgttaaagaatacacaatttggggtattgggatttttctccttttctctgagacattccaccattttaatttttgtaactgcttatttatgtgaaaagggttatttttacttagcttagctatgtcagccaatccgattgccttaggtgaaagaaaccaccgaaatccctcaggtcccttggtcaggagcctctcaagattttttttgtcagaggctccaaatagaaaataagaaaaggttttcttcattcatggctagagctagatttaactcagtttctaggcacctcagaccaatcatcaactaccattctattccatgtttgcacctgtgcattttctgtttgcccccattcactttgtcaggaaaccttggcctctgctaaggtgtatttggtccttgagaagtgggagcaccctacagggacactatcactcatgctggtggcattgtttacagctagaaagctgcactggtgctaatgccccttggggaaatggggctgtgaggaggaggattataacttaggcctagcctcttttaacagcctctgaaatttatcttttcttctatggggtctataaatgtatcttataataaaaaggaaggacaggaggaagacaggcaaatgtacttctcacccagtcttctacacagatggaatctctttggggctaagagaaaggttttattctatattgcttacctgatctcatgttaggcctaagaggctttctccaggaggattagcttggagttctctatactcaggtacctctttcagggttttctaaccctgacacggactgtgcatactttccctcatccatgctgtgctgtgttatttaatttttcctggctaagatcatgtctgaattatgtatgaaaattattctatgtttttataataaaaataatatatcagacatcga

SEQ ID NO: 90 - protein, 526 aa, Homo sapiens
MGHLSAPLHRVRVPWQGLLLTASLLTFWNPPTTAQLTTESMPFNVAEGKEVLLLVHNLPQQLFGYSWYKGERVDGNRQIVGYAIGTQQATPGPANSGRETIYPNASLLIQNVTQNDTGFYTLQVIKSDLVNEEATGQFHVYPELPKPSISSNNSNPVEDKDAVAFTCEPETQDTTYLWWINNQSLPVSPRLQLSNGNRTLTLLSVTRNDTGPYECEIQNPVSANRSDPVTLNVTYGPDTPTISPSDTYYRPGANLSLSCYAASNPPAQYSWLINGTFQQSTQELFIPNITVNNSGSYTCHANNSVTGCNRTTVKTIIVTELSPVVAKPQIKASKTTVTGDKDSVNLTCSTNDTGISIRWFFKNQSLPSSERMKLSQGNTTLSINPVKREDAGTYWCEVFNPISKNQSDPIMLNVNYNALPQENGLSPGAIAGIVIGVVALVALIAVALACFLHFGKTGRASDQRDLTEHKPSVSNHTQDHSNDPPNKMNEVTYSTLNFEAQQPTQPTSASPSLTATEIIYSEVKKQ

SEQ ID NO: 91 - DNA, 3736 bp, Mus musculus
aaagctcctttaagaaaagcagggcagatatcagggcagcctggcttagcagtagtgttggagaagaagctagcaggcaggcagcagagacatggagctggcctcagcacatctccacaaagggcaggttccctggggaggactactgctcacagcctcacttttagcctcctggagccctgccaccactgctgaagtcaccattgaggctgtgccgccccaggttgctgaagacaacaatgttcttctacttgttcacaatctgcccctggcgcttggagcctttgcctggtacaagggaaacactacggctatagacaaagaaattgcacgatttgtaccaaatagtaatatgaatttcacggggcaagcatacagcggcagagagataatatacagcaatggatccctgctcttccaaatgatcaccatgaaggatatgggagtctacacactagatatgacagatgaaaactatcgtcgtactcaggcgactgtgcgatttcatgtacaccccatattattaaagcccaacatcacaagcaacaactccaatcccgtggagggtgacgactccgtatcattaacctgtgactcttacactgaccctgataatataaactacctgtggagcagaaatggtgaaagcctttcagaaggtgacaggctgaagctgtctgagggcaacaggactctcactttactcaatgtcacgaggaatgacacaggaccctatgtgtgtgaaacccggaatccagtgagtgtcaaccgaagtgacccattcagcctgaacattatctatggtccggacaccccgattatatccccctcagatatttatttgcatccagggtcaaacctcaacctctcctgccatgcagcctctaacccacctgcacagtacttttggcttatcaatgagaagccccatgcatcctcccaagagctctttatccccaacatcactactaataatagcggaacctatacctgcttcgtcaataactctgtcactggcctcagtaggaccacagtcaagaacattacagtccttgagccagtgactcagcccttcctccaagtcaccaacaccacagtcaaagaactagactctgtgaccctgacctgcttgtcgaatgacattggagccaacatccagtggctcttcaatagccagagtcttcagctcacagagagaatgacactctcccagaacaacagcatcctcagaatagaccctattaagagggaagatgccggcgagtatcagtgtgaaatctcgaatccagtcagcgtcaggaggagcaactcaatcaagctggacataatatttgacccaacacaaggaggcctctcagatggcgccattgctggcatcgtgattggagttgtggctggggtggctctaatagcagggctggcatatttcctctattccaggaagtctggcgggggaagtgaccagcgagatctcacagagcacaaaccctcagcctccaaccacaatctggctccttctgacaactctcctaacaaggtggatgacgtcgcatacactgtcctgaacttcaattcccagcaacccaaccggccaacttcagccccttcttctccaagagccacagaaacagtttattcagaagtaaaaaagaagtgagcataatctgtccgtctgtcctgctggctgcaccagtgatgcattcccggattctgttcctcactggagggtctcagcacacacacacacgtacacatgcgcgcgcgcacacacacacacacacacacacacacacacttacacacacactcatgcattcactctattgactccttcagtgtctatagaagaaaaggtggatcctggagcctacagaaaactcaacccttctaggctttcaaatttggctgagagtgaggtatcaaaatttctcaccctttcactttcctgacccagattgttgaaaattgacctattcagagcaccttcattcccctcccaactccaagtcctgccctatcagagtctgacttgaatttccataaaccttggaggtcacctaagtgcttacgccaaacaaaacaaaacaaaacaaaacaaaacaaaacaaaacaaaacaaaacaaaccagaagcaggaaatggccagtcccatatctttaaaggctgattggaagccaccatacatgagaagatcaaacctccatgggcaatctacacacccgacaactgtcatgcttacccatctgggacattcgagtctctgaaccttgtgccctcacgcctgagcccttctctgagcctttctccagaaaatccactcacagcaactagagaggctctttgtcagcaactccaagcaaactgctaggcaggattcagaagaaaagacagcatctctaacatccaccaggaaggtgcccagaaaagcagagctggtgactttggactgacagacatctggagtgtgaaaaagcagcacagagctaaccttcggagagtgttgaaattatttgaaaagaagccatatttggaggtattggagttttcctctttctgagacaatccactatttgaaaattgtagctactgaattgcctctcagtatgcgagctgatcactttgccttagggccactagatttctgtctcccttagcccctcaagcccttttgatcatgagttccaaaccaaaaataaataaatgaacagtgaggcagtcccttgcagtaccactgtcatgggtcaggctaagcctcctgcttttctgaattagtcaagaaaagccttggtttccctttttccatctctttatcttgtctttcagatactggccagagcctggacactcttcctctgagatctccagcttctctgccttcttgtgtttcttttaaactctaacaaaaactgttctcaccttcaaaaaataaaataataacaagctttccacatccccaccaaagagggacccagctaggtttctggaaacccagcaccagcctccagctgcccttctgcagtgtttctgcctctgtttccctttcgttttgacttttttccttcttttgagacagagttccagcatggagcctgtgcaggtttcaatcccacagtaacaccttctgcagcaccccacctgctcagactgcagccctggccaccaggcctggctacctggacattctgtctgccctgcactctcaggaaaccttggcctctgctactgtctgtttggctcattcaaagtgtgtccttaaaggaatgcagtcacccatgccagaggcagtgtttacagcctggaatgctctgcacttccagtggaccagtgctccaccggaagtgggctgttagcagggtcctctcacctggccctggcctttctgtagccttgaatcctgccttccccaccagggcaccagggatgagtgcagcagcaggaggagaggcaaacagtcacctcaggaaccttctgagctaaggcacaccctctgtgcctgtcaagcaaaggttgtattggatatcaagtgtttggtctcacgccaagccaacaggctttggagagaattaattagttctcctactcagggatttctttcagtcctaacacagcctgtgtatattttgcttcacccacgcaatgctggattatttaattttgcccggcttaagacaaatctgagttacttgtaaatttgctctatgttcataataaaaatgtattatatatcactgatagca

SEQ ID NO: 92 - protein, 521 aa, Mus musculus
MELASAHLHKGQVPWGGLLLTASLLASWSPATTAEVTIEAVPPQVAEDNNVLLLVHNLPLALGAFAWYKGNTTAIDKEIARFVPNSNMNFTGQAYSGREIIYSNGSLLFQMITMKDMGVYTLDMTDENYRRTQATVRFHVHPILLKPNITSNNSNPVEGDDSVSLTCDSYTDPDNINYLWSRNGESLSEGDRLKLSEGNRTLTLLNVTRNDTGPYVCETRNPVSVNRSDPFSLNIIYGPDTPIISPSDIYLHPGSNLNLSCHAASNPPAQYFWLINEKPHASSQELFIPNITTNNSGTYTCFVNNSVTGLSRTTVKNITVLEPVTQPFLQVTNTTVKELDSVTLTCLSNDIGANIQWLFNSQSLQLTERMTLSQNNSILRIDPIKREDAGEYQCEISNPVSVRRSNSIKLDIIFDPTQGGLSDGAIAGIVIGVVAGVALIAGLAYFLYSRKSGGGSDQRDLTEHKPSASNHNLAPSDNSPNKVDDVAYTVLNFNSQQPNRPTSAPSSPRATETVYSEVKKK

SEQ ID NO: 93 - DNA, 3388 bp, Homo sapiens
attcctcacgatgacccgacagtctctgctttctttttcctttcttccagaaggagatttaaccatagtagaaagaatggagaactattaactgcctttcttctgtgggctgtgattttcagaggggaatgctaagaggtgattttcaatgttgggactcaaaggtgaagacactgaaggacagaatttttggcagaggaaagatcttcttcggtcaccatacttgagttagctctagggaagtggaggtttccatttggaattctatagcttcttccaggtcatagtgtctgccccccaccttccagtatctcctgatatgcagcatgaatgaaaatggcaagtttcctggccttccttctgctcaactttcgtgtctgcctccttttgcttcagctgctcatgcctcactcagctcagttttctgtgcttggaccctctgggcccatcctggccatggtgggtgaagacgctgatctgccctgtcacctgttcccgaccatgagtgcagagaccatggagctgaagtgggtgagttccagcctaaggcaggtggtgaacgtgtatgcagatggaaaggaagtggaagacaggcagagtgcaccgtatcgagggagaacttcgattctgcgggatggcatcactgcagggaaggctgctctccgaatacacaacgtcacagcctctgacagtggaaagtacttgtgttatttccaagatggtgacttctatgaaaaagccctggtggagctgaaggttgcagcactgggttctgatcttcacgttgatgtgaagggttacaaggatggagggatccatctggagtgcaggtccactggctggtacccccaaccccaaatacagtggagcaacaacaagggagagaacatcccgactgtggaagcacctgtggttgcagacggagtgggcctgtatgcagtagcagcatctgtgatcatgagaggcagctctggggagggtgtatcctgtaccatcagaagttccctcctcggcctggaaaagacagccagcatttccatcgcagaccccttcttcaggagcgcccagaggtggatcgccgccctggcagggaccctgcctgtcttgctgctgcttcttgggggagccggttacttcctgtggcaacagcaggaggaaaaaaagactcagttcagaaagaaaaagagagagcaagagttgagagaaatggcatggagcacaatgaagcaagaacaaagcacaagagtgaagctcctggaggaactcagatggagaagtatccagtatgcatctcggggagagagacattcagcctataatgaatggaaaaaggccctcttcaagcctgcggatgtgattctggatccaaaaacagcaaaccccatcctccttgtttctgaggaccagaggagtgtgcagcgtgccaaggagccccaggatctgccagacaaccctgagagatttaattggcattattgtgttctcggctgtgagagcttcatatcagggagacattactgggaggtggaggtaggggacaggaaagagtggcatataggggtgtgcagtaagaatgtgcagagaaaaggctgggtcaaaatgacacctgagaatggattctggactatggggctgactgatgggaataagtatcggactctaactgagcccagaaccaacctgaaacttcctaagccccctaagaaagtgggggtcttcctggactatgagactggagatatctcattctacaatgctgtggatggatcgcatattcatactttcctggacgtctccttctctgaggctctatatcctgttttcagaattttgaccttggagcccacggccctgactatttgtccagcgtgaaaagaagaagagagttcctccaattctgaccgagtgctgatcattccctagagacaccagtaaccccgggcttagctaacgaaagtggggagcctcaggctgaagtaacttttctctgcttctccctgcccagctcagagctgagggcctccccctccacagcaaccaatcacaaccataaagctacaagcacgcactgaagcactttactgatactcattcaattattcatatgacagttgtttgagtttggtaccatcttattttccccttatacagataaggaaactggggtgcagaaaagtgaattgactacaaagtagacatgactagttaacaacacagctgggatctaaacagcaataactaacattaatggagaacttaaaatgctctgagtgctgtgttatgagctttggtggatgtcactcctttaatcctcgcaacaccctgtcgggtagtctcatttagcaagtatggaagttgaggcagggcaacattaagcaacttacataactcatgcagtaatttctgcagttgggagatgttcagcttcagtccccggccctatggccgttcttttccaccctgtttcttcccccataggaagaacccacctgtagccctgaggttcttttcccaggatggctccaggataaggatcactgtaggtggttgtggagttgacacccctgttgactccttcccagctgattgtcagagccttagacccagcacgccttggattagctctgcagagtgtcttggttgagagaataacctcaccgtacccacatgacacgtgatttggaaagagactagaggccacacttgataaatcatggggaacagatgtgttccacccaacaaatgtgataagtgatcatgcagccagagccagccttccttcaatcaaggtttccaggcagagcaaataccctagagattctctgtgatataggaaatttggatgaagggagctagaagaaatacagggatttttttttttttttaagatggagtcttactctgttgctaggctggagtgcagtggtgcgatctcagctccctgcaacctccacctcctgggttcaaacaattctcctgcctcagcctcccgagtactgggaatataggtgcacgccaccacacccaacaaatttttgtacttttagtacagatgagggttcactatgttggccaggatggtctcgatctcttgacctcatgatccacccacctcggtctcccaaagtgctgggattacaggcttgagccaccgggtgaccggcttacagggatatttttaatcccgttatggactctgtctccaggagaggggtctatccacccctgctcattggtggatgttaaaccaatattcctttcaactgctgcctgctagggaaaaactactcctcattatcatcattattattgctctccactgtatcccctctacctggcatgtgcttgtcaagttctagttgttcaataaatttgttaataatgctga

SEQ ID NO: 94 - protein, 513 aa, Homo sapiens
MKMASFLAFLLLNFRVCLLLLQLLMPHSAQFSVLGPSGPILAMVGEDADLPCHLFPTMSAETMELKWVSSSLRQVVNVYADGKEVEDRQSAPYRGRTSILRDGITAGKAALRIHNVTASDSGKYLCYFQDGDFYEKALVELKVAALGSDLHVDVKGYKDGGIHLECRSTGWYPQPQIQWSNNKGENIPTVEAPVVADGVGLYAVAASVIMRGSSGEGVSCTIRSSLLGLEKTASISIADPFFRSAQRWIAALAGTLPVLLLLLGGAGYFLWQQQEEKKTQFRKKKREQELREMAWSTMKQEQSTRVKLLEELRWRSIQYASRGERHSAYNEWKKALFKPADVILDPKTANPILLVSEDQRSVQRAKEPQDLPDNPERFNWHYCVLGCESFISGRHYWEVEVGDRKEWHIGVCSKNVQRKGWVKMTPENGFWTMGLTDGNKYRTLTEPRTNLKLPKPPKKVGVFLDYETGDISFYNAVDGSHIHTFLDVSFSEALYPVFRILTLEPTALTICPA

SEQ ID NO: 95 - DNA, 3776 bp, Homo sapiens
gactcttactgtttctcatggtgagaagacaatatttgctttctctttttcctttcttccggatgagaggctaagccataatagaaagaatggagaattattgattgaccgtctttattctgtgggctctgattctccaatgggaataccaagggatggttttccatactggaacccaaaggtaaagacactcaaggacagacatttttggcagagcatagatgaaaatggcaagttccctggctttccttctgctcaactttcatgtctccctcctcttggtccagctgctcactccttgctcagctcagttttctgtgcttggaccctctgggcccatcctggccatggtgggtgaagacgctgatctgccctgtcacctgttcccgaccatgagtgcagagaccatggagctgaagtgggtaagttccagcctaaggcaggtggtgaacgtgtatgcagatggaaaggaagtggaagacaggcagagtgcaccgtatcgagggagaacttcgattctgcgggatggcatcactgcagggaaggctgctctccgaatacacaacgtcacagcctctgacagtggaaagtacttgtgttatttccaagatggtgacttctatgaaaaagccctggtggagctgaaggttgcagcactgggttctaatcttcacgtcgaagtgaagggttatgaggatggagggatccatctggagtgcaggtccaccggctggtacccccaaccccaaatacagtggagcaacgccaagggagagaacatcccagctgtggaagcacctgtggttgcagatggagtgggcctatatgaagtagcagcatctgtgatcatgagaggcggctccggggagggtgtatcctgcatcatcagaaattccctcctcggcctggaaaagacagccagcatttccatcgcagaccccttcttcaggagcgcccagccctggatcgcagccctggcagggaccctgcctatcttgctgctgcttctcgccggagccagttacttcttgtggagacaacagaaggaaataactgctctgtccagtgagatagaaagtgagcaagagatgaaagaaatgggatatgctgcaacagagcgggaaataagcctaagagagagcctccaggaggaactcaagaggaaaaaaatccagtacttgactcgtggagaggagtcttcgtccgataccaataagtcagcctgatgctctaatggaaaaatggccctcttcaagcctggtgaggaaatgcttcagatgaggctccaccttgttaaataaattggatgtatggaaaaatagactgcagaaaaggggaactcatttagctcacgagtggtcgagtgaagattgaaaattaacctctgagggccagcacagcagctcatgcctgtaatcctagcactttggaaggctgaggagggcggatcacaaggtcaggagatcaagaccatcctggctaacacggtgaaaccccgtctctactaaaaatacaaaaaataaaaaattagccgggcatggtgacgggcacctgtagtcccagctactcgggaggctgaggcaggagaatggcatgaacccggaaggcagagcttgcagtgagccgagatcacgccactgcactccagcctgggagacagagcgagactctgtctcaagaaaaaaaaaaaaaaaaaaaaagaaaagaaaattaacctctgagtataaagcatcagtgggcagaatcaatgtggggagggaaacaacaaaaatgtagaaagaggatccttgttgcttcttggggccgcatcagggtattgggttaggcagatactgaccttactttcatttcccctctggtcactagacccctggggctttcaccaatgacattgatgagagaatcacattcagggcaggctagggacacggggttctggaaggacctcctcagcatggcccaagccttgcatgctgtggctcttaaatccaggaaaaatggctgaccccatggacacctcctcaaactctctgcagcagatgtaattctgtatccagacatggcaaatgccatcctccttgtttctgaggaccagaggagtgtacagcgtgctgaggagccccatgacctaccagacaaccctgagagatttgaatggcgttactgtgtgcttggctgtgaaagcttcatgtcagagagacactactgggaggtggaagtgggggacagaaaagagtggcatattggggtatgtagtaagaacgtggagaggaaaaaagtttgggtcaaaatgacaccggagaacggatactggactatgggcctgactgatgggaataagtatcgggctctcactgagcccagaaccaacctgaaacttcctgagcctcctaggaaagtgggggtcatcctggactatgagactggacatatctcgttctacaatgccacggatggatctcatatctacacatttctgcacgcctcttcctctgagcctctgtatcctgtattcagaattttgaccttggagcccactgccctgaccgtttgcccaataccaaaagtagagagttcccccgatcccgacctagtgcctgatcattccctggagataccactgaccccaggcttagctaatgaaagtggggagcctcaggctgaagtaacatctctgcttctccctgcccagcctggagctaagggtctcaccctccacaacagccagtcagaaccataaagctacaggcacacactgaagcactttactgatattcattcaattattccataggacagttgtttgagtttggtgccaccttattggcccctttatacagataaggaaactggggtgtagaaaagtgtattgactttacaaagcagacaggaatagtgaacaacagagctgggatctgaacaacaatgactaacattaatggagaatttaaaacgttctgagtgctgtgttatgagctttggtgggtgtcactcctttaatcctcacaacaccctgtcaggtagtctcatttggcaagtatggaagcagaggcagggcaacattaagtagcttacataactcacacggtaatttgtgcagttgggagatgttcagcttcagtccctggccaattgcccgttcttttccagcctgatttttcctgcatgggaagagcccacatgtagccctgaggttcccttcccaggacagctccaggatcgagatcactgtgagtggttgtggagttaagacccctatggactccttcccagctgattatcagagccttagacccagcactccttggattggctctgcagagtgtcttggttgagagaataacgttgcagttcccacagggcatgtgactttgaaagagactagaggccacactcagttaataatggggcacagatgtgttcccacccaacaaatgtgataagtgatcgtgcagccagagccagccttccttcagtcaaggtttccaggcagagcaaataccctagagattctctgtaatattggtaatttggatgaaggaagctagaagaattacagggatgtttttaatcccactatggactcagtctcctggaaaaggatctgtccactcctggtcattggtggatgttaaacccatattcctttcaactgctgcctgctagggaaaactgctcctcattatcatcactattattgctcaccactgtatcccctctactgggcaagtgcttgtcaagttctagttgttcaataaatttgttaataatgctga

SEQ ID NO: 96 - protein, 334 aa, Homo sapiens
MKMASSLAFLLLNFHVSLLLVQLLTPCSAQFSVLGPSGPILAMVGEDADLPCHLFPTMSAETMELKWVSSSLRQVVNVYADGKEVEDRQSAPYRGRTSILRDGITAGKAALRIHNVTASDSGKYLCYFQDGDFYEKALVELKVAALGSNLHVEVKGYEDGGIHLECRSTGWYPQPQIQWSNAKGENIPAVEAPVVADGVGLYEVAASVIMRGGSGEGVSCIIRNSLLGLEKTASISIADPFFRSAQPWIAALAGTLPILLLLLAGASYFLWRQQKEITALSSEIESEQEMKEMGYAATEREISLRESLQEELKRKKIQYLTRGEESSSDTNKSA

SEQ ID NO: 97 - DNA, 2890 bp, Homo sapiens
agatttcgtttcctgcatctccaaacatggcgacctaggagaaggggaagaacaattttttctcctcttttgggaaggtttgtgtctagtagtgcctgtgcccctgggcagattggagagaagagggacgactggagaatcgtcgagaaccagcggagaaaagaaaaagcaacgtttaattctagaaggcctcctgtccctgcctgctctgggtgctcatggaatcagctgctgccctgcacttctcccggccagcctccctcctcctcctcctcctcagcctgtgtgcactggtctcagcccagtttattgtcgtggggcccactgatcccatcttggccacggttggagaaaacactacgttacgctgccatctgtcacccgagaaaaatgctgaggacatggaggtgcggtggttccggtctcagttctcccccgcagtgtttgtgtataaaggtggcagagagagaacagaggagcagatggaggagtaccgaggaagaaccacctttgtgagcaaagacatcagcaggggcagcgtggccctggtcatacacaacatcacagcccaggaaaacggcacctaccgctgttacttccaagaaggcaggtcctacgatgaggccatcctgcacctcgtagtggcaggactaggctctaagcccctcatttcaatgaggggccatgaagacgggggcatccggctggagtgcatatctagagggtggtacccaaagcccctcacagtgtggagggacccctacggtggggttgcgcctgccctgaaagaggtctccatgcctgatgcagacggcctcttcatggtcaccacggctgtgatcatcagagacaagtctgtgaggaacatgtcctgctctatcaacaacaccctgctcggccagaagaaagaaagtgtcatttttattccagaatcctttatgcccagtgtgtctccctgtgcagtggccctgcctatcattgtggttattctgatgatacccattgccgtatgcatctattggatcaacaaactccaaaaggaaaaaaagattctgtcaggggaaaaggagtttgaacgggaaacaagagaaattgctctaaaggaactggagaaagaacgtgtgcaaaaagaggaagaacttcaagtaaaagagaaacttcaagaagaattgcgatggagaagaacattcttacatgctgttgatgtggtcctggatccagacaccgctcatcccgatctcttcctgtcagaggaccggagaagtgtgagaaggtgccccttcaggcacctaggggagagcgtgcctgacaacccagagagattcgacagtcagccttgtgtcctaggccgggagagcttcgcttcagggaaacattactgggaggtggaggtggaaaacgtgattgagtggactgtgggggtctgtagagacagtgttgagaggaaaggggaggtcctgctgattcctcagaatggcttctggaccttggagatgcataaagggcaataccgggccgtgtcctcccctgataggattctccctttgaaggagtccctttgccgggtgggcgtcttcctggactatgaagctggagatgtctccttctacaacatgagggacagatcgcacatctacacatgtccccgttcagccttttccgtgcctgtgaggcccttcttcaggttggggtgtgaggacagccccatcttcatctgccctgcactcacaggagccaatggggtcacggtgcctgaagagggcctgacacttcacagagtggggacccaccagagcctatagaatcaattccttggtctcacagccatgtagacaagccctggtcatctcagcagccaccgcacaacacccctggtggaagacacgccctcctcccctctggtcacacaagagaacatcttccagctgcctctttcacacccactacagacctcagccccagttttctcctcctcactaggctgtgtttttagtagttcctttgcttgtaactatgggatgggatccaggcatagggaactagttgttacacagctcccagccaagaagaaagtgtgagaagttgatgggcagcaaacctgctgtttaacatcagggtgaccacattaagcccagtattccagttggcaccagaagatatggacttggaatgaggcctacagggttcaccaggatgtaagaggagagaggaatccacaggaccaccagagaggagagggaaccagatatgcagatcagagatagaggaagtggaaccagagagctgggagggaccaaggttgtaagggtggctaagtcccaccataacagctaaggggacctgggagatgatggctcatttccacccagccccaggatttccagagcgcacatccacaggcctggacctgggatgaagatgaatgaagaacatggatgcacgtggatgtagtttggctcaggtgtccctgcagttggcaaggagtcagtactcagtccctgagtgtggctgaaatttgaggtcctggctgagccaaggagtaatggaccagatctacctcagtattcaagttcagtggggacaccagtggcttcaaacttcctggtttcatgatatcttgagacgccttacaaatgatggaggattccaaagagtttttgtttatttgggttaatatttgttggtatttatggcatttgagattgaaactaagaaatgttttaatttattacctttacaacatttatttacattacatacatacatttacaacatttattaatttatattaaaatagcatgaataagccaattataggttaatataagtagaatgtttgtgaaaaataagtatggtatccaaagcaaaataaattttattgtgaagtgtg

SEQ ID NO: 98 - protein, 527 aa, Homo sapiens
MESAAALHFSRPASLLLLLLSLCALVSAQFIVVGPTDPILATVGENTTLRCHLSPEKNAEDMEVRWFRSQFSPAVFVYKGGRERTEEQMEEYRGRTTFVSKDISRGSVALVIHNITAQENGTYRCYFQEGRSYDEAILHLVVAGLGSKPLISMRGHEDGGIRLECISRGWYPKPLTVWRDPYGGVAPALKEVSMPDADGLFMVTTAVIIRDKSVRNMSCSINNTLLGQKKESVIFIPESFMPSVSPCAVALPIIVVILMIPIAVCIYWINKLQKEKKILSGEKEFERETREIALKELEKERVQKEEELQVKEKLQEELRWRRTFLHAVDVVLDPDTAHPDLFLSEDRRSVRRCPFRHLGESVPDNPERFDSQPCVLGRESFASGKHYWEVEVENVIEWTVGVCRDSVERKGEVLLIPQNGFWTLEMHKGQYRAVSSPDRILPLKESLCRVGVFLDYEAGDVSFYNMRDRSHIYTCPRSAFSVPVRPFFRLGCEDSPIFICPALTGANGVTVPEEGLTLHRVGTHQSL

SEQ ID NO: 99 - DNA, 2017 bp, Homo sapiens
agaacagcgcagtttgccctccgctcacgcagagcctctccgtggcttccgcaccttgagcattaggccagttctcctcttctctctaatccatccgtcacctctcctgtcatccgtttccatgccgtgaggtccattcacagaacacatccatggctctcatgctcagtttggttctgagtctcctcaagctgggatcagggcagtggcaggtgtttgggccagacaagcctgtccaggccttggtgggggaggacgcagcattctcctgtttcctgtctcctaagaccaatgcagaggccatggaagtgcggttcttcaggggccagttctctagcgtggtccacctctacagggacgggaaggaccagccatttatgcagatgccacagtatcaaggcaggacaaaactggtgaaggattctattgcggaggggcgcatctctctgaggctggaaaacattactgtgttggatgctggcctctatgggtgcaggattagttcccagtcttactaccagaaggccatctgggagctacaggtgtcagcactgggctcagttcctctcatttccatcacgggatatgttgatagagacatccagctactctgtcagtcctcgggctggttcccccggcccacagcgaagtggaaaggtccacaaggacaggatttgtccacagactccaggacaaacagagacatgcatggcctgtttgatgtggagatctctctgaccgtccaagagaacgccgggagcatatcctgttccatgcggcatgctcatctgagccgagaggtggaatccagggtacagataggagatacctttttcgagcctatatcgtggcacctggctaccaaagtactgggaatactctgctgtggcctattttttggcattgttggactgaagattttcttctccaaattccagtggaaaatccaggcggaactggactggagaagaaagcacggacaggcagaattgagagacgcccggaaacacgcagtggaggtgactctggatccagagacggctcacccgaagctctgcgtttctgatctgaaaactgtaacccatagaaaagctccccaggaggtgcctcactctgagaagagatttacaaggaagagtgtggtggcttctcagagtttccaagcagggaaacattactgggaggtggacggaggacacaataaaaggtggcgcgtgggagtgtgccgggatgatgtggacaggaggaaggagtacgtgactttgtctcccgatcatgggtactgggtcctcagactgaatggagaacatttgtatttcacattaaatccccgttttatcagcgtcttccccaggaccccacctacaaaaataggggtcttcctggactatgagtgtgggaccatctccttcttcaacataaatgaccagtcccttatttataccctgacatgtcggtttgaaggcttattgaggccctacattgagtatccgtcctataatgagcaaaatggaactcccatagtcatctgcccagtcacccaggaatcagagaaagaggcctcttggcaaagggcctctgcaatcccagagacaagcaacagtgagtcctcctcacaggcaaccacgcccttcctccccaggggtgaaatgtaggatgaatcacatcccacattcttctttagggatattaaggtctctctcccagatccaaagtcccgcagcagccggccaaggtggcttccagatgaagggggactggcctgtccacatgggagtcaggtgtcatggctgccctgagctgggagggaagaaggctgacattacatttagtttgctctcactccatctggctaagtgatcttgaaataccacctctcaggtgaagaaccgtcaggaattcccatctcacaggctgtggtgtagattaagtagacaaggaatgtgaataatgcttagatcttattgatgacagagtgtatcctaatggtttgttcattatattacactttcagtaa

SEQ ID NO: 100 - protein, 500 aa, Homo sapiens
MALMLSLVLSLLKLGSGQWQVFGPDKPVQALVGEDAAFSCFLSPKTNAEAMEVRFFRGQFSSVVHLYRDGKDQPFMQMPQYQGRTKLVKDSIAEGRISLRLENITVLDAGLYGCRISSQSYYQKAIWELQVSALGSVPLISITGYVDRDIQLLCQSSGWFPRPTAKWKGPQGQDLSTDSRTNRDMHGLFDVEISLTVQENAGSISCSMRHAHLSREVESRVQIGDTFFEPISWHLATKVLGILCCGLFFGIVGLKIFFSKFQWKIQAELDWRRKHGQAELRDARKHAVEVTLDPETAHPKLCVSDLKTVTHRKAPQEVPHSEKRFTRKSVVASQSFQAGKHYWEVDGGHNKRWRVGVCRDDVDRRKEYVTLSPDHGYWVLRLNGEHLYFTLNPRFISVFPRTPPTKIGVFLDYECGTISFFNINDQSLIYTLTCRFEGLLRPYIEYPSYNEQNGTPIVICPVTQESEKEASWQRASAIPETSNSESSSQATTPFLPRGEM

SEQ ID NO: 101 - DNA, 3583 bp, Homo sapiens
gggactttttggacacccagagaacaggtcccagataccgagtccgcaactccaaacatcgcgattaataggaggcctctggtctctgcctgccctgggtgctcatggaaccagctgctgctctgcacttctccctgccagcctccctcctcctcctcctgctcctcctccttctcagcctgtgtgcactggtctcagcccagtttactgtcgtggggccagctaatcccatcctggccatggtgggagaaaacactacattacgctgccatctgtcacccgagaaaaatgctgaggacatggaggtgcggtggttccggtctcagttctcccccgcagtgtttgtgtataagggtgggagagagagaacagaggagcagatggaggagtaccggggaagaatcacctttgtgagcaaagacatcaacaggggcagcgtggccctggtcatacataacgtcacagcccaggagaatgggatctaccgctgttacttccaagaaggcaggtcctacgatgaggccatcctacgcctcgtggtggcaggccttgggtctaagcccctcattgaaatcaaggcccaagaggatgggagcatctggctggagtgcatatctggagggtggtacccagagcccctcacagtgtggagggacccctacggtgaggttgtgcccgccctgaaggaggtttccatcgctgatgctgacggcctcttcatggtcaccacagctgtgatcatcagagacaagtatgtgaggaatgtgtcctgctctgtcaacaacaccctgctcggccaggagaaggaaactgtcatttttattccagaatcctttatgcccagcgcatctccctggatggtggccctagctgtcatcctgaccgcatctccctggatggtgtccatgactgtcatcctggctgttttcatcatcttcatggctgtcagcatctgttgcatcaagaaacttcaaagggaaaaaaagattctgtcaggggaaaagaaagttgaacaagaggaaaaagaaattgcacagcaacttcaagaagaattgcgatggagaagaacattcttacatgctgctgatgtggtcctggatccagacaccgctcatcccgagctcttcctgtcagaggaccggagaagtgtgaggcggggcccctacaggcagagagtgcctgacaacccagagagattcgacagtcagccttgtgtcctgggatgggagagcttcgcctcagggaaacattactgggaggtggaggtggaaaacgtgatggtgtggactgtgggggtctgcagacacagtgttgagaggaaaggggaggtcctgctgattcctcagaatggcttctggaccctggagatgtttggaaaccaataccgggccctgtcctcccctgagaggattctccctttgaaggagtccctttgccgggtgggcgtcttcctggactatgaagctggagatgtctccttctacaacatgagggacagatcgcacatctacacatgtccccgttcagcctttactgtgcctgtgaggcccttcttcaggttagggtctgatgacagccccatcttcatctgccctgcactcacaggagccagtggggtcatggtgcctgaagagggcctgaaacttcacagagtggggacccaccagagcctatagaatcaattccttggactcacagccatgcagataagccctggccatctcagcagccaccgcacaacccccctaatgaaagacacgccctcctcccctctggtcacgtaagagaacatcttccagctgcctttttcacacccactccagccctctgccccagttttctcctcctcactagtctgtggctttagtagttcctttgcttgtaattatgggatgggatccaggcatagggaactagttgtttcatagctcccagtcaaaaagaaagtgagagaagctgttgggcagcgaacctactgtttaaaatcaggataaccacattaagcccaatatgccagttggcaccagatgctgtggacttggaatgaggccaacagggttcaccaggatgagagaggagagaggaatccacaggaccaccagaagggagagggaaccagatatgcagatcagagatagaggaagtggaaccagagagctgggagggaccaaggttgtaaggatggctaagtcccaccataagagctaaagggtcctgggagatgatggctcatttccacccaaccccaggatttccacagcacacacccacaggcctggacctgggatgaagatgaatgaagaacatggactcatgtggatgtggtttggctcagatgtccctgcaataaacaaggggtcagtacttagtccctgagtgtggttgaggtttgaggtcctggtcgagcagggcagtactggaccaggtctacgtcagcattcaggttcaatggggacaccagtggcttcaaacttcctgatctaattatgtttttagacacttagaagttattgaggactttaaagagcttttgtttatttgggttaatatttatgacatttgacattgaaacaaaaatttaaaatgttatcttttaatttatgttaaaatagcattaataaatcagttataggttaatgtagataggatgttttgtgaaaaagcaatctattgtgtccaaataaaaaaacaaaaagtgtgacactggttaactttttccagatctcatgtctggcttaataagagatatttgtattatcatatctgcctttgtattaaacctattggtatatcataggtcatgttagctcaaaaaaactttactgcacactactgagagaatgagatgaaaaacgattaatgtttcattattattattgtgaaaatattattaacactggggactccttaagagtacatcagagttctctctaggaatcccaaaaccacattttgaaactagaatagtggatcctggaagttaatccatgtgctggttaattttagatgtcaacctgactggattaaggaatacctagacagctggtacaacattatttctgggtgtgtctgtgagtgtgtttccagaagagattggcaagtgagtcagtgggaaattctctccttctgttggctgggtgcccaatacaacaaaaaggcagaggaaaggcaaattcttctctcctctggagctgagacactcttcttcttctgcccttggacatcagaactcctggctctccggcctttgaacttcaggacttgtaccaggaggccctgggttctcaggcctttggctttggactgagagttacacaatcagcttccctggttctgaggctttcagacttaaactgagccatgctaccagcatcccagggtctccagcctacagatgagctgttgtgcgatttcttagcctccataatcacatgagccaatctccttaataaatgcctgctcatagatctgtatctacatctatatctgtatgtgcatctatatctatgcctatatctatatctatatcatattgattttgtctctctggagaaccctgactaataaaatgaggcatctaaaa

SEQ ID NO: 102 - protein, 523 aa, Homo sapiens
MEPAAALHFSLPASLLLLLLLLLLSLCALVSAQFTVVGPANPILAMVGENTTLRCHLSPEKNAEDMEVRWFRSQFSPAVFVYKGGRERTEEQMEEYRGRITFVSKDINRGSVALVIHNVTAQENGIYRCYFQEGRSYDEAILRLVVAGLGSKPLIEIKAQEDGSIWLECISGGWYPEPLTVWRDPYGEVVPALKEVSIADADGLFMVTTAVIIRDKYVRNVSCSVNNTLLGQEKETVIFIPESFMPSASPWMVALAVILTASPWMVSMTVILAVFIIFMAVSICCIKKLQREKKILSGEKKVEQEEKEIAQQLQEELRWRRTFLHAADVVLDPDTAHPELFLSEDRRSVRRGPYRQRVPDNPERFDSQPCVLGWESFASGKHYWEVEVENVMVWTVGVCRHSVERKGEVLLIPQNGFWTLEMFGNQYRALSSPERILPLKESLCRVGVFLDYEAGDVSFYNMRDRSHIYTCPRSAFTVPVRPFFRLGSDDSPIFICPALTGASGVMVPEEGLKLHRVGTHQSL

SEQ ID NO: 103 - DNA, 2983 bp, Mus musculus
gaaattgtgagacttgcacgcggaatgggtcctccgaggtctgctgtcgcgagtcccagcactttgcaagtaatggagaacagaaaattctttcctctctactgtagcagtttgttctctggtggcgactgtgctcagcgacaagttggagagtagagaaaaggcaagataatcagcatttgagggtcagagaagaaaagaaaacgcagttaattctagaaggttttctgtccacacgtgacctaggtgactctgtcctgaagacctatggagcctacaacttccctgcgttcttgcccgatagcctcccttctcttcttcttggtcctcagcctgtttgtgctggtctcagcccagtttactgtcataggaccagctgagcccatcctggccatggtaggagagaataccacactacactgccacctgtcaccagagagaaatgccgaagagatggaggtgcggtggttccggtggcgtttcttccctgcagtgctggtgtacagaggccatcaagagagaccagaggagcagatggtggcataccgaggaagaaccaccttcatgcgcacagacatcagcaagggaagagttgcgctcattatccacaatgtcacagcctatgacaatggcatctactgctgttacttccaggaaggcaggtcctatgaccaggcaaccatgaagcttatggtggcaagccttggctctgagccacttattaaaatgaagacacttgaggatgggagcatcttgctagagtgcacatctgaagggtggtacccagagccccgagctgtgtggagagacccctatgatgaagttgtacctgccctggaggaggagtatacagctgacagagaaggcctcttcacagtcaccatgactataatcatcagggactgctctgtgaggaacatgacctgctctgtcaataacactctgctcagccaggaggtggaaagtgtgattctcattccagaatccttcgtgcccagccttcctctgtggatggtggctgtggctgtcactctgcctgtagtaatgctgattctcctcacatctggaagcatctgccttgtcaagaaacaccgcaggaagaaatctattctgtcagctgaaaaagaagccgaatatgaagagaaggaagctgcacggcaacttcaagaggaactgcgatggagacgaaccctcttacatgctgctgacgtggtcctggacccagatacagctcatcctgagctcttcctgtcagatgaccagagaagtgtaatacgaggctcttcgaggcagagtgtgcctgacaaccctgagagatttgactgccgtccatgtgtcctgggcagggaaagcttctcctcagggaagcattactgggaggtggaggtggaaaatgtaatggtgtgggccattggtgtttgtagagacagcgtggaaaggaaaggggaggccctgttggttcctcagaatggcttctggaccctggagatgtttggaagccagtatcgagccctgtcctccccagaaaagatcatacctctgaaagagcgtcttcaccgtatagctgtcttcctggactgtgagggtggagatatttctttctacaacatgagagacagatcacacatttacacatgtcctcctgtgactttcactgggcccctgagacccttctttaggcttggttctgatgacagtcccctgttcatctgtccagcattcacaggggcacagggagttacaatacctgagggtggcttattcctatataagacaagaccaatttctcagagccttgtaaggaagccatagctctctacacagtaccatctgttggagactagaccccatgtccttcagatcacatggagcatcttccagctgccaccttcacacatacttcaggcccagtcctcagattactacatcatttcttctaactatgggcctaggtagagccagtcttaggggactattgctgtaatacagctctctcctgagaagaaagtgtgagaagggcagaaaacttggagtttcaacatgctgctctggtcacagtggatatcaggcaagagcaacagggtggatcaggatgtaagaagtgagaactacagaggaaggagacagataaagatgaattgaggccgaagatggaggaaatggactgaagagctctggggtaagccctatgtgacagctgtggataggtaggagctaatggtccattgatatccaaagccaaagatttaaatatcacatagtgtgtctggagtgtatatctgtagacctacacatgagaggaaacaatcatagtgatgaactggatgtaagctggctcagacgtccctacaataaacacttctgagttccatgtctgtgctcagtaagaatggcttgaggcttgcggtccatgctgagcagccaggtccacatgaatcggatttactagagtaggtagcagttcaagttccttaggctcaggatgtcttcctttcccccaagcccttcccccttcaagataggtctcactatgtagaccaggccagcctccacctccagagttctgggattaaagacaagcacaaccatgtccagtttatgagcttgtgatatatacagaagattaagttctgtgttcttgggttagtaactgttgagatttgttttgagtcatgctctcactggctagcactgctcttgactttctctccccatctttttgttattgcttttcaagacatggtttcactgtgtatttctggctgataagctgattttgaattcacagagatctgcctctgcctcctgagtgctgggattaaaggtgtgttacactacgcctggcttcactctatctcttcagtgtggggattataggtttatactatcatgcctaactaatgtctgttgctgcatatgacatttgaactttagaacagaaaaacaactatacatattaatatatattaaactaataataagc

SEQ ID NO: 104 - protein, 514 aa, Mus musculus
MEPTTSLRSCPIASLLFFLVLSLFVLVSAQFTVIGPAEPILAMVGENTTLHCHLSPERNAEEMEVRWFRWRFFPAVLVYRGHQERPEEQMVAYRGRTTFMRTDISKGRVALIIHNVTAYDNGIYCCYFQEGRSYDQATMKLMVASLGSEPLIKMKTLEDGSILLECTSEGWYPEPRAVWRDPYDEVVPALEEEYTADREGLFTVTMTIIIRDCSVRNMTCSVNNTLLSQEVESVILIPESFVPSLPLWMVAVAVTLPVVMLILLTSGSICLVKKHRRKKSILSAEKEAEYEEKEAARQLQEELRWRRTLLHAADVVLDPDTAHPELFLSDDQRSVIRGSSRQSVPDNPERFDCRPCVLGRESFSSGKHYWEVEVENVMVWAIGVCRDSVERKGEALLVPQNGFWTLEMFGSQYRALSSPEKIIPLKERLHRIAVFLDCEGGDISFYNMRDRSHIYTCPPVTFTGPLRPFFRLGSDDSPLFICPAFTGAQGVTIPEGGLFLYKTRPISQSLVRKP

SEQ ID NO: 105 - DNA, 2945 bp, Homo sapiens
agctttctcacttggtagcagtggcctcttgtgcctttttctccaagatcacccaggctgaagctcctgaggggactcacatcagttatcttgctgctccagaagggtgggagatggcagttttcccaagctccggtctccccagatgtctgctcaccctcattctcctccagctgcccaaactggattcagctccctttgacgtgattggacccccggagcccatcctggccgttgtgggtgaggacgccgagctgccctgtcgcctgtctccgaacgcgagcgccgagcacttggagctacgctggttccgaaagaaggtttcgccggccgtgctggtgcatagggacgggcgcgagcaggaagccgagcagatgcccgagtaccgcgggcgggcgacgctggtccaggacggcatcgccaaggggcgcgtggccttgaggatccgtggcgtcagagtctctgacgacggggagtacacgtgctttttcagggaggatggaagctacgaagaagccctggtgcatctgaaggtggctgctctgggctctgaccctcacatcagtatgcaagttcaagagaatggagaaatctgtctggagtgcacctcagtgggatggtacccagagccccaggtgcagtggagaacttccaagggagagaagtttccatctacatcagagtccaggaatcctgatgaagaaggtttgttcactgtggctgcttcagtgatcatcagagacacttctgcgaaaaatgtgtcctgctacatccagaatctccttcttggccaggagaagaaagtagaaatatccataccagcttcctccctcccaaggctgactccctggatagtggctgtggctgtcatcctgatggttctaggacttctcaccattgggtccatatttttcacttggagactatacaacgaaagacccagagagaggaggaatgaattcagctctaaagagagactcctggaagaactcaaatggaaaaaggctaccttgcatgcagttgatgtgactctggacccagacacagctcatccccacctctttctttatgaggattcaaaatctgttcgactggaagattcacgtcagaaactgcctgagaaaacagagagatttgactcctggccctgtgtgttgggccgtgagaccttcacctcaggaaggcattactgggaggtggaggtgggagacaggactgactgggcaatcggcgtgtgtagggagaatgtgatgaagaaaggatttgaccccatgactcctgagaatgggttctgggctgtagagttgtatggaaatgggtactgggccctcactcctctccggacccctctcccattggcagggcccccacgccgggttgggattttcctagactatgaatcaggagacatctccttctacaacatgaatgatggatctgatatctatactttctccaatgtcactttctctggccccctccggcccttcttttgcctatggtctagcggtaaaaagcccctgaccatctgcccaattgctgatgggcctgagagggtcacagtcattgctaatgcccaggacctttctaaggagatcccattgtcccccatgggggaggactctgcccctagggatgcagacactctccattctaagctaatccctacccaacccagccaaggggcaccttaaggaatatctcagctcatctgttttcctttcctctaacccctctcctccatagccttctgaggcttcacctgctagctttacccagtctgtttcttcctgttgggtggcaattaattaatcctgtgaaggttacattgctgctgctagagagggtggggattgcaccttccaaatctgtttctgtaccaatatttgggggatggaggggtgactcaaactgcttctagtgttctcctaatcccttaagactagaacctataggaaactacttggagcaaactcaaaggacagattagggatcgagattgggtcaggttagcatggggttgtggttgaaatatcttggtatccaggataagggtatgtggaaaaacaggctttaggcaagtggaaaattcaaaatgtgctgtgaaaggacaatctcaggctgaaatcccataaaggaacttggagggaatattatgatggagggaagtgaggtgaatccaggcacatgatgaacacctggctcatccatagagttttcacagcctatatcgcaaattttctaagccacgtcctataggacagaggagactggccccacttctatgggtctgagctgtggaaaagggagagcagagaggaactgagatgagcagggatgaagggtcaggcagaaagcgtgatagaggagagaatttttgacaaaactcaaaagttgtttgcacagctgttctttgtaccctgttcctttctctgcgccctcctgtttctcccttgcctggaagtcattccaccctcaatttgttgatccacaagtttccagttgtcctcttctttttgttatagcatctctctatttcaaagacattcctagaagtcatccttcagtgatatcaccacttgctcagtcaccatctcaaccttatgtcacctcagccctcatctcaatgcccaaaccccttacacacaccttcagttagcttcaactgcctccgtttccacactgtgcacctttcactttccctacccagctttcctacatgctgcctctcctcagggtcccctgaatgctgcatcattgtgttcagtgcagctggactgattgcacctgtgtatttgcccctgagcactttcctttacacatgtggcttgtcttgccaatagactccaggcttataccttccatttccatcgtattctccagtttccaggatagacgttgctcatcgtctttacctaataaataagtttgtctgattgctgaaa

SEQ ID NO: 106 - protein, 526 aa, Homo sapiens
MAVFPSSGLPRCLLTLILLQLPKLDSAPFDVIGPPEPILAVVGEDAELPCRLSPNASAEHLELRWFRKKVSPAVLVHRDGREQEAEQMPEYRGRATLVQDGIAKGRVALRIRGVRVSDDGEYTCFFREDGSYEEALVHLKVAALGSDPHISMQVQENGEICLECTSVGWYPEPQVQWRTSKGEKFPSTSESRNPDEEGLFTVAASVIIRDTSAKNVSCYIQNLLLGQEKKVEISIPASSLPRLTPWIVAVAVILMVLGLLTIGSIFFTWRLYNERPRERRNEFSSKERLLEELKWKKATLHAVDVTLDPDTAHPHLFLYEDSKSVRLEDSRQKLPEKTERFDSWPCVLGRETFTSGRHYWEVEVGDRTDWAIGVCRENVMKKGFDPMTPENGFWAVELYGNGYWALTPLRTPLPLAGPPRRVGIFLDYESGDISFYNMNDGSDIYTFSNVTFSGPLRPFFCLWSSGKKPLTICPIADGPERVTVIANAQDLSKEIPLSPMGEDSAPRDADTLHSKLIPTQPSQGAP

SEQ ID NO: 107 - DNA, 3454 bp, Mus musculus
aacagcacacagccttcttccttctgaagagctctctctttggccccggggtgacaagcagcccttttcacttgatcactgtggctctggctcccttttcctctgggtctgtcgaaatcgcctgaagctcttggcgggcttcattgccccagttagctcagagatggcagttcccaccaactcctgcctcctggtctgtctgctcaccctcactgtcctacagctgcccacgctggattcggcagctcccttcgatgtgaccgcacctcaggagccagtgttggccctagtgggctcagatgccgagctgacctgtggcttttccccaaacgcgagctcagaatacatggagctgctgtggtttcgacagacgaggtcgacagcggtacttctataccgggatggccaggagcaggagggccagcagatgacggagtaccgcgggagggcgacgctggcgacagccgggcttctagacggccgcgctactctgctgatccgagatgtcagggtctcagaccagggggagtaccggtgccttttcaaagacaacgacgacttcgaggaggccgccgtatacctcaaagtggctgctgtgggttcagatcctcaaatcagtatgacggttcaagagaatggagaaatggagctggagtgcacctcctctggatggtacccagagcctcaggtgcagtggagaacaggcaacagagagatgctaccatccacgtcagagtccaagaagcataatgaggaaggcctgttcactgtggcagtttcaatgatgatcagagacagctccataaagaacatgtcctgctgcatccagaatatcctccttggccaggggaaggaagtagagatctccttaccagctcccttcgtgccaaggctgactccctggatagtagctgtggctatcatcttactggccttaggatttctcaccattgggtccatatttttcacttggaaactatacaaggaaagatccagtctgcggaagaaggaatttggctctaaagagagacttctggaagaactcagatgcaaaaagactgtactgcatgaagttgacgtgactctggatccagacacagcccacccccacctcttcctgtatgaagattcaaagtcagttcgattggaagattcacgtcagatcctgcctgatagaccagagagatttgactcctggccctgtgtgttgggccgtgagacctttacttcagggagacattactgggaggtggaggtgggagatagaactgactgggccattggtgtgtgtagggagaatgtggtgaagaaagggtttgaccccatgactcctgataatgggttctgggctgtggagttgtatggaaatgggtactgggccctcaccccactcaggacctctctccgattagcagggccccctcgcagagttggggtttttctggactatgacgcaggagacatttccttctacaacatgagtaacggatctcttatctatactttccctagcatctctttctctggccccctccgtcccttcttttgtctgtggtcctgtggtaaaaagcccctgaccatctgttcaactgccaatgggcctgagaaagtcacagtcattgctaatgtccaggacgacattcccttgtccccgctgggggaaggctgtacttctggagacaaagacactctccattctaaactgatcccgttctcacctagccaagcggcaccataacaaatattccagcttcacgactttgccttcctttgactaatccctcatgccccgaagcttcagctgttggcttcttgcagccctgcttcttcctggtggatggagattaattcacattgggaaggttaggtatgttgctgccagacaaggcaggaagaaaggccatcctagtttgtttctgtactaacagtggggaggaagagagctgaatcctaaactatttccagtgctcatattccttcaggccagagcctatagagaaggatttggtacaatcactcgagggatcaagaggcaattaggttggcatggaattatggcagaaacatctggaataggggtatgtggaatgacaggttttaggtaagggagaacaaaaccaaaccataggatgctgagaaagaaagatcttggactaaactcctaaaaaagcacttagagaagatatgacaggcaaatgaagtgaatttggtctaatttgatacacttgccctgtccctagggtttttcagttatatctcaatttttttgttgttaattacatttttgacagcttcatacatgtatataatgcattctaattactctcactctcctctattctgtcttatttccctcccctcccctcataccttccttcttgcttcaaacctggcacactgagtttaatgggctatcatgggaacatggatttagagctttcctctgagctcaagagagcaggtgtgactgaatacagtgatttcccctctcctacaatcaatcagcagtcaatagctcagctgggaggggtagggcctcatgagacttcccctatcaaggctaaatgttgaaagggccagtttttagcacctgtgagatcatgattgcaagagcccagaagacagcattgctcggtcattctccctaccctttggcttttctggtcttttgtcctctctttcaggatgtgtctgaactctgtatcttaagttttctatgtcatgttctataagatagaggagactggccctgcttgtttgagagcaatgtgagcaagctagcaagagacagaaaggagcggagatgaataggggtagagaaaatttttaaacaaaccctccaggtgtgtgtgtgtgtgtgtgtgtcttcctcttttttgacctccctaaaggtcaatccaacctcacattattgactccactaggtgggggttctgtgtgtgtgtgtgtgtgtgtgtgtgtgtgtgtgtgtgttttaagatagaggtttactatgtagcttaggctggctttgaattcctgatcctcctgcctctaccttccaagtgctggaaacatagccacatccaccacccctatccagtccacctggtttgattcagcaacgctcaggtagcatcgctgtttgatctggagctgccagctccctcggcccccactgcaatgcttaaccccctcacaggcaccttcccttgcctaacactgccatccttttccacactgagccatttgctcaatgtagcctacccaggtatcctgctttctggtccccaaagttacaccatgatgctcagcacagctggacagtttgtcccaatttgtgtgtgtcctcctgtttgtatgggacttctttttgtcaatggcctgtgtgtgtatccaagctcttccacttctattgtatttttccggcttctaaaacagatgttaccaaataaagaaagagaaagaaaaaaaa

SEQ ID NO: 108 - protein, 524 aa, Mus musculus
MAVPTNSCLLVCLLTLTVLQLPTLDSAAPFDVTAPQEPVLALVGSDAELTCGFSPNASSEYMELLWFRQTRSTAVLLYRDGQEQEGQQMTEYRGRATLATAGLLDGRATLLIRDVRVSDQGEYRCLFKDNDDFEEAAVYLKVAAVGSDPQISMTVQENGEMELECTSSGWYPEPQVQWRTGNREMLPSTSESKKHNEEGLFTVAVSMMIRDSSIKNMSCCIQNILLGQGKEVEISLPAPFVPRLTPWIVAVAIILLALGFLTIGSIFFTWKLYKERSSLRKKEFGSKERLLEELRCKKTVLHEVDVTLDPDTAHPHLFLYEDSKSVRLEDSRQILPDRPERFDSWPCVLGRETFTSGRHYWEVEVGDRTDWAIGVCRENVVKKGFDPMTPDNGFWAVELYGNGYWALTPLRTSLRLAGPPRRVGVFLDYDAGDISFYNMSNGSLIYTFPSISFSGPLRPFFCLWSCGKKPLTICSTANGPEKVTVIANVQDDIPLSPLGEGCTSGDKDTLHSKLIPFSPSQAAP

SEQ ID NO: 109 - DNA, 2926 bp, Homo sapiens
acatctgcttcctgtaggccctctgggcagaagcatgcgctggtgtctcctcctgatctgggcccaggggctgaggcaggctcccctcgcctcaggaatgatgacaggcacaatagaaacaacggggaacatttctgcagagaaaggtggctctatcatcttacaatgtcacctctcctccaccacggcacaagtgacccaggtcaactgggagcagcaggaccagcttctggccatttgtaatgctgacttggggtggcacatctccccatccttcaaggatcgagtggccccaggtcccggcctgggcctcaccctccagtcgctgaccgtgaacgatacaggggagtacttctgcatctatcacacctaccctgatgggacgtacactgggagaatcttcctggaggtcctagaaagctcagtggctgagcacggtgccaggttccagattccattgcttggagccatggccgcgacgctggtggtcatctgcacagcagtcatcgtggtggtcgcgttgactagaaagaagaaagccctcagaatccattctgtggaaggtgacctcaggagaaaatcagctggacaggaggaatggagccccagtgctccctcacccccaggaagctgtgtccaggcagaagctgcacctgctgggctctgtggagagcagcggggagaggactgtgccgagctgcatgactacttcaatgtcctgagttacagaagcctgggtaactgcagcttcttcacagagactggttagcaaccagaggcatcttctggaagatacacttttgtctttgctattatagatgaatatataagcagctgtactctccatcagtgctgcgtgtgtgtgtgtgtgtgtatgtgtgtgtgtgttcagttgagtgaataaatgtcatcctcttctccatcttcatttccttggccttttcgttctattccattttgcattatggcaggcctagggtgagtaacgtggatcttgatcataaatgcaaaattaaaaaatatcttgacctggttttaaatctggcagtttgagcagatcctatgtctctgagagacacattcctcataatggccagcattttgggctacaaggttttgtggttgatgatgaggatggcatgactgcagagccatcctcatctcattttttcacgtcattttcagtaactttcactcattcaaaggcaggttataagtaagtcctggtagcagcctctatggggagatttgagagtgactaaatcttggtatctgccctcaagaacttacagttaaatggggagacaatgttgtcatgaaaaggtattatagtaaggagagaaggagacatacacaggccttcaggaagagacgacagtttggggtgaggtagttggcataggcttatctgtgatgaagtggcctgggagcaccaaggggatgttgaggctagtctgggaggagcaggagttttgtctagggaacttgtaggaaattcttggagctgaaagtcccacaaagaaggccctggcaccaagggagtcagcaaacttcagattttattctctgggcaggcatttcaagtttccttttgctgtgacatactcatccattagacagcctgatacaggcctgtagcctcttccggccgtgtgtgctggggaagccccaggaaacgcacatgcccacacagggagccaagtcgtagcatttgggccttgatctaccttttctgcatcaatacactcttgagcctttgaaaaaagaacgtttcccactaaaaagaaaatgtggatttttaaaatagggactcttcctaggggaaaaaggggggctgggagtgatagagggtttaaaaaataaacaccttcaaactaacttcttcgaacccttttattcactccctgacgactttgtgctggggttggggtaactgaaccgcttatttctgtttaattgcattcaggctggatcttagaagacttttatccttccaccatctctctcagaggaatgagcggggaggttggatttactggtgactgattttctttcatgggccaaggaactgaaagagaatgtgaagcaaggttgtgtcttgcgcatggttaaaaataaagcattgtcctgcttcctaagacttagactggggttgacaattgttttagcaacaagacaattcaactatttctcctaggatttttattattattattttttcacttttctaccaaatgggttacataggaagaatgaactgaaatctgtccagagctccaagtcctttggaagaaagattagatgaacgtaaaaatgttgttgtttgctgtggcagtttacagcatttttcttgcaaaattagtgcaaatctgttggaaatagaacacaattcacaaattggaagtgaactaaaatgtaatgacgaaaagggagtagtgttttgatttggaggaggtgtatattcggcagaggttggactgagagttgggtgttatttaacataattatggtaattgggaaacatttataaacactattgggatggtgataaaatacaaaagggcctatagatgttagaaatgggtcaggttactgaaatgggattcaatttgaaaaaaatttttttaaatagaactcactgaactagattctcctctgagaaccagagaagaccatttcatagttggattcctggagacatgcgctatccaccacgtagccactttccacatgtggccatcaaccacttaagatggggttagtttaaatcaagatgtgctgttataattggtataagcataaaatcacactagattctggagatttaatatgaataataagaatactatttcagtagttttggtatattgtgtgtcaaaaatgataatattttggatgtattgggtgaaataaaatattaacatta

SEQ ID NO: 110 - protein, 244 aa, Homo sapiens
MRWCLLLIWAQGLRQAPLASGMMTGTIETTGNISAEKGGSIILQCHLSSTTAQVTQVNWEQQDQLLAICNADLGWHISPSFKDRVAPGPGLGLTLQSLTVNDTGEYFCIYHTYPDGTYTGRIFLEVLESSVAEHGARFQIPLLGAMAATLVVICTAVIVVVALTRKKKALRIHSVEGDLRRKSAGQEEWSPSAPSPPGSCVQAEAAPAGLCGEQRGEDCAELHDYFNVLSYRSLGNCSFFTETG

SEQ ID NO: 111 - DNA, 726 bp, Mus musculus
atgcatggctggctgctcctggtctgggtccaggggctgatacaggctgccttcctcgctacaggagccacagcaggcacgatagatacaaagaggaacatctctgcagaggaaggtggctctgtcatcttacagtgtcacttctcctctgacacagctgaagtgacccaagtcgactggaagcagcaggaccagcttctggccatttatagtgttgacctggggtggcatgtcgcttcagtcttcagtgatcgggtggtcccaggccccagcctaggcctcaccttccagtctctgacaatgaatgacacgggagagtacttctgtacctatcatacgtatcctggtgggatttacaaggggagaatattcctgaaggtccaagaaagctcagtggctcagttccagactgccccgcttggaggaaccatggctgctgtgctgggactcatttgcttaatggtcacaggagtgactgtactggctagaaagaagtctattagaatgcattctatagaaagtggccttgggagaacagaagcggagccacaggaatggaacctgaggagtctctcatcccctggaagccctgtccagacacaaactgcccctgctggtccctgtggagagcaggcagaagatgactatgctgacccacaggaatactttaatgtcctgagctacagaagcctagagagcttcattgctgtatcgaagactggctaa

SEQ ID NO: 112 - protein, 241 aa, Mus musculus
MHGWLLLVWVQGLIQAAFLATGATAGTIDTKRNISAEEGGSVILQCHFSSDTAEVTQVDWKQQDQLLAIYSVDLGWHVASVFSDRVVPGPSLGLTFQSLTMNDTGEYFCTYHTYPGGIYKGRIFLKVQESSVAQFQTAPLGGTMAAVLGLICLMVTGVTVLARKKSIRMHSIESGLGRTEAEPQEWNLRSLSSPGSPVQTQTAPAGPCGEQAEDDYADPQEYFNVLSYRSLESFIAVSKTG

SEQ ID NO: 113 - DNA, 911 bp, Homo sapiens
agagaggggcaggctggtcccctgacaggttgaagcaagtagacgcccaggagccccgggagggggctgcagtttccttccttccttctcggcagcgctccgcgcccccatcgcccctcctgcgctagcggaggtgatcgccgcggcgatgccggaggagggttcgggctgctcggtgcggcgcaggccctatgggtgcgtcctgcgggctgctttggtcccattggtcgcgggcttggtgatctgcctcgtggtgtgcatccagcgcttcgcacaggctcagcagcagctgccgctcgagtcacttgggtgggacgtagctgagctgcagctgaatcacacaggacctcagcaggaccccaggctatactggcaggggggcccagcactgggccgctccttcctgcatggaccagagctggacaaggggcagctacgtatccatcgtgatggcatctacatggtacacatccaggtgacgctggccatctgctcctccacgacggcctccaggcaccaccccaccaccctggccgtgggaatctgctctcccgcctcccgtagcatcagcctgctgcgtctcagcttccaccaaggttgtaccattgcctcccagcgcctgacgcccctggcccgaggggacacactctgcaccaacctcactgggacacttttgccttcccgaaacactgatgagaccttctttggagtgcagtgggtgcgcccctgaccactgctgctgattagggttttttaaattttattttattttatttaagttcaagagaaaaagtgtacacacaggggccacccggggttggggtgggagtgtggtggggggtagtggtggcaggacaagagaaggcattgagctttttctttcattttcctattaaaaaatacaaaaatca

SEQ ID NO: 114 - protein, 193 aa, Homo sapiens
MPEEGSGCSVRRRPYGCVLRAALVPLVAGLVICLVVCIQRFAQAQQQLPLESLGWDVAELQLNHTGPQQDPRLYWQGGPALGRSFLHGPELDKGQLRIHRDGIYMVHIQVTLAICSSTTASRHHPTTLAVGICSPASRSISLLRLSFHQGCTIASQRLTPLARGDTLCTNLTGTLLPSRNTDETFFGVQWVRP

SEQ ID NO: 115 - DNA, 842 bp, Mus musculus
gaaggtgccaaaagctccaggggatttccctgccctccgagaagaggcccagttcttcccctgcatcggacatccccgaggttctaagggcaggtcaaggcaggcagaagcttcaaaagctcggctgaggaggctacagcttcccgctgccttcaggccgctgcttccgtgcagggatgccggaggaaggtcgcccttgcccctgggttcgctggagcgggaccgcgttccagcgccaatggccatggctgctgctggtggtgtttattactgtgttttgctgttggtttcattgtagcggactactcagtaagcagcaacagaggctgctggagcaccctgagccgcacacagctgagttacagctgaatctcacagttcctcggaaggaccccacactgcgctggggagcaggcccagccttgggaaggtccttcacacacggaccagagctggaggagggccatctgcgtatccatcaagatggcctctacaggctgcatatccaggtgacactggccaactgctcttccccaggcagcaccctgcagcacagggccaccctggctgtgggcatctgctcccccgctgcgcacggcatcagcttgctgcgtgggcgctttggacaggactgtacagtggcattacagcgcctgacatacctggtccacggagatgtcctctgtaccaacctcaccctgcctctgctgccgtcccgcaacgctgatgagaccttctttggagttcagtggatatgcccttgaccacaactccaggatgacttgtgaatattttttttcttttcaagttctacgtatttataaatgtatatagtacacata

SEQ ID NO: 116 - protein, 195 aa, Mus musculus
MPEEGRPCPWVRWSGTAFQRQWPWLLLVVFITVFCCWFHCSGLLSKQQQRLLEHPEPHTAELQLNLTVPRKDPTLRWGAGPALGRSFTHGPELEEGHLRIHQDGLYRLHIQVTLANCSSPGSTLQHRATLAVGICSPAAHGISLLRGRFGQDCTVALQRLTYLVHGDVLCTNLTLPLLPSRNADETFFGVQWICP

SEQ ID NO: 117 - DNA, 3779 bp, Homo sapiens
gtcattttcctacgcgccctctgacatcagccaccttctctgtagctagtttctctgcacacaacttaatccctggcaatgaaaaatgaacctctcccccacccttgctgccgcctctcgcctcacgcccccagagaagagtttctccaccaggcagcaggtgaaggtttttttccaagtcacatgattcaggattcagggggagaatccttcttggaacagagatgggcccagaactgaatcagatgaagagagataaggtgtgatgtggggaagactatataaagaatggacccagggctgcagcaagcactcaacggaatggcccctcctggagacacagccatgcatgtgccggcgggctccgtggccagccacctggggaccacgagccgcagctatttctatttgaccacagccactctggctctgtgccttgtcttcacggtggccactattatggtgttggtcgttcagaggacggactccattcccaactcacctgacaacgtccccctcaaaggaggaaattgctcagaagacctcttatgtatcctgaaaagggctccattcaagaagtcatgggcctacctccaagtggcaaagcatctaaacaaaaccaagttgtcttggaacaaagatggcattctccatggagtcagatatcaggatgggaatctggtgatccaattccctggtttgtacttcatcatttgccaactgcagtttcttgtacaatgcccaaataattctgtcgatctgaagttggagcttctcatcaacaagcatatcaaaaaacaggccctggtgacagtgtgtgagtctggaatgcaaacgaaacacgtataccagaatctctctcaattcttgctggattacctgcaggtcaacaccaccatatcagtcaatgtggatacattccagtacatagatacaagcacctttcctcttgagaatgtgttgtccatcttcttatacagtaattcagactgaacagtttctcttggccttcaggaagaaagcgcctctctaccatacagtatttcatccctccaaacacttgggcaaaaagaaaactttagaccaagacaaactacacagggtattaaatagtatacttctccttctgtctcttggaaagatacagctccagggttaaaaagagagtttttagtgaagtatctttcagatagcaggcagggaagcaatgtagtgtggtgggcagagccccacacagaatcagaagggatgaatggatgtcccagcccaacctctaattcactgtatggtcttgatctatttcttctgttttgagagcctccagttaaaatggggctccagtaccagagcagctagcaactctgccctaatgggaaatgaaggggagctgggtgtgagtgtttacactgtgcccttcacgggatacttcttttatctgcagatggcctaatacttagttgtccaagtcgcgatcaaggactctctcacacaggaaacttccctatactggcagatacacttgtgactgaaccatgcccagtttatgcctgtctgactgtcactctggcactaggaggctgatcttgtactccatatgaccccacccctaggaacccccagggaaaaccaggctgggacagccccctgttcctgagatggaaagcacaaatttaatacaccaccacaatggaaaacaagttcaaagacttttacttacagatcctggacagaaagggcataatgagtctgaagggcagtcctccttctctaggttacatgaggcaggaataagaagtcagacagagacagcaagacagttaacaatgtaggtaaagaaatagggtgtggtcactctcaattcactggcaaatgcctgaatggtctgtctgaaggaagcaacagagaagtggggaatccagtctgctaggcaggaaagatgcctctaagttcttgtctctggccagaggtgtggtatagaaccagaaacccatatcaagggtgactaagcccggcttctggtatgagaaattaaacttgtatacaaaatggttgccaaggcaacataaaattataagaattcactataccttcccctccctggaactcaggatccaagtctagaaaatgaaaggactgggtttgaattgcttcaaaacctcttccatctcagaagaccagaccctgggaactgagattccagacacaattttggaagctctccaaccaaaataaggcccccctaccccagtatataattgaagacactagtaacacctgactgcatctcatctcagcagagccagaatatggggacaaggttcagggtgccctgctgaatggtgtgaacagcaggatctcaaggatgtaatggaaagaactaccacactgaccatccagaatctaagagaccatctgggtgtttgggaaaccatctgacgaggcctgactctattccagttagattgacaataattgagcagcaggcatttttcatttctggtcaggaaagcattgtgcctttagcaaacaatcagtgtgcaacagtgatgtggtcatctagccagggaatggctgctccatcccctgcataatatattcctgcttcaaacacctctcagaaaaccagttccgcgagggtttttatatccccacaaagttgttgagagacaatgatgaccctggaagtggggaggaggacttctgagaaacagcaacctctctcctgattggggtagccatgagatttctctagctatatccaacttggcatctgtacatcatctttggaggaacatcttatttgtggaaggaccttgacaagccgtttgagatggaatgtaggccctgatgttatgcttcagtaaaaaaagatggaagcttccctgctataccaaaacatggagcaaaatttgcatttttctcaagaaggagagaaaaggagtaggactccagcaaagtttgtcagaaggaaagctagaaaagatttaaaagaaaaaaagaaagaacaaatcagcagtggtggtatggatgaaagggacttgagagaacaaaaatggctaagggaaaattttaagtcatctgctgagcagtgtgctgtgtcaacctcctcctaggtctcctctatgaaatatttagtaaagtctacatttctctttaactctttctgtgagtagattctttgggagaagcaggcattggaagaggtgttgaattcagcaagccaaatggtctgtggtaaaaaacaaaacagactttgagactcaaggctaaaaaaacagggaaatggctggcatttgagtcacacactaactgcataggacaaatgaatcttgcttaaaccaactcatgcattcttgaaaaggtatatgcaacccaactgtgtgttaactaagcaatttttttgccatctcacattctaactcgagaaagattccattttcatttttcaccaactgttctctgagcagaggtacctgacttttgcactgtgagtggtttctaatctcagtctctgtcaagcaatgctaagaaagccaacacctaaagacacaaggggtacatcatttaaatgaataatgtaaccaaacaaacaaaaaaagagaataatcattaataactcaactgatagatatgtagggagtaggcaacccaggaagtttaaaactaaattctgttactcttgagggttaaccagcccctgggaatgttatgagcaaatgatactccatgagtaaaatgatatctatgcaagtaaaataaataatttatctaactgggaa

SEQ ID NO: 118 - protein, 234 aa, Homo sapiens
MDPGLQQALNGMAPPGDTAMHVPAGSVASHLGTTSRSYFYLTTATLALCLVFTVATIMVLVVQRTDSIPNSPDNVPLKGGNCSEDLLCILKRAPFKKSWAYLQVAKHLNKTKLSWNKDGILHGVRYQDGNLVIQFPGLYFIICQLQFLVQCPNNSVDLKLELLINKHIKKQALVTVCESGMQTKHVYQNLSQFLLDYLQVNTTISVNVDTFQYIDTSTFPLENVLSIFLYSNSD

SEQ ID NO: 119 - DNA, 2228 bp, Mus musculus
agattaatcccaggcgatgaaaaatgaacctctcccccacccttgcagccacccttcgcctcacgcccccagagaagagtttctccatccggcaactggtgaaggcttttttccaagtcacatgatccaggatgcaggggaaaatccttcttggaacagagctgggtacagaaccgaatcagatgaggagagataaggtgtgatgtgggacagactatataaagcatggagccagggctgcaacaagcaggcagctgtggggctccttcccctgacccagccatgcaggtgcagcccggctcggtagccagcccctggagaagcacgaggccctggagaagcacaagtcgcagctacttctacctcagcaccaccgcactggtgtgccttgttgtggcagtggcgatcattctggtactggtagtccagaaaaaggactccactccaaatacaactgagaaggccccccttaaaggaggaaattgctcagaggatctcttctgtaccctgaaaagtactccatccaagaagtcatgggcctacctccaagtgtcaaagcatctcaacaataccaaactgtcatggaacgaagatggcaccatccacggactcatataccaggacgggaacctgatagtccaattccctggcttgtacttcatcgtttgccaactgcagttcctcgtgcagtgctcaaatcattctgtggacctgacattgcagctcctcatcaattccaagatcaaaaagcagacgttggtaacagtgtgtgagtctggagttcagagtaagaacatctaccagaatctctctcagtttttgctgcattacttacaggtcaactctaccatatcagtcagggtggataatttccagtatgtggatacaaacactttccctcttgataatgtgctatccgtcttcttatatagtagctcagactgaatagttgttcttaacctttatgaaaatgctgtctaccatacagtacttcatctgtccaaacatgggccaaagaaaatattaggacaactcaaactaagcatgtgagttagtgcacttctctttctgtcctttggaaaaatacaaacccaggatttagaaagtggagtctccttcagatgcacaaacaggaaagaatgtgatatgtgcacagagacctacttgggcactagaaggggttgagttgtcccagtataaccactaattcactgaccttgagccatttttccttcccctggaacttggggtctgaatctggaaaagtaggagatgagatttacatttccccaatattttcttcaactcagaagacgagactgtggagctgagctccctacacagatgaaggcctcccatggcatgaggaaaatgatggtaccagtaatgtctgtctgactgtcatctcagcaagtcctaaggacttccatgctgccttgttgaaagatactctaacctcttgtaatgggcaaagtgatcctgtctctcactgaggggagtagctgctgccatctcctgagacatacatggagacattttctgcccaaattccattctgtgtgcagtttttaagtattcccccaaaagttcttgacaatgagaactttgaatgtgggaagagcttctggacagcaaacattaacagcttctcctgaccagagagaccatgcaagcttggtcttagacccatcaagcttgaggtttctacattgtgggagacagacttttgacaaaccatttgagttgatgtctgggcccctgggagttctccttcagtaaggagagcaagccgttctagtgctgtgtcagaggatggagtaaaatagacacttttctgaaggaaaggagaacaaagttccagaaaaaggctagaaaatgtttaaaaggaaaagaaaaaactcagcttttctcatatgagaggaacccagaaaaacaacactgaaaaagaagagtggctctgtcaacctcctcttaggtctcctcctctctagttattgggaaaggagttgcatggtacaggacaagttctggtgtgtggtcaaatagaatcagatgtggagaacaccatgcagagaataaggagacctgtcatatttgtgttgtactcaaatgaggggcaaatgaatcttaggctaaatcaaataacagtctctgtcaagctgtgctcagaaagtcaaccactgaagatggagggtgaggcacgtcatttaaaaaaagtgaaatgtagc

SEQ ID NO: 120 - protein, 239 aa, Mus musculus
MEPGLQQAGSCGAPSPDPAMQVQPGSVASPWRSTRPWRSTSRSYFYLSTTALVCLVVAVAIILVLVVQKKDSTPNTTEKAPLKGGNCSEDLFCTLKSTPSKKSWAYLQVSKHLNNTKLSWNEDGTIHGLIYQDGNLIVQFPGLYFIVCQLQFLVQCSNHSVDLTLQLLINSKIKKQTLVTVCESGVQSKNIYQNLSQFLLHYLQVNSTISVRVDNFQYVDTNTFPLDNVLSVFLYSSSD

SEQ ID NO: 121 - DNA, 2744 bp, Homo sapiens
atcacttgtgaatttttgttttccacagctctcatttctccaaaaatgtgtttgagccacttggaaaatatgcctttaagccattcaagaactcaaggagctcagagatcatcctggaagctgtggctcttttgctcaatagttatgttgctatttctttgctccttcagttggctaatctttatttttctccaattagagactgctaaggagccctgtatggctaagtttggaccattaccctcaaaatggcaaatggcatcttctgaacctccttgcgtgaataaggtgtctgactggaagctggagatacttcagaatggcttatatttaatttatggccaagtggctcccaatgcaaactacaatgatgtagctccttttgaggtgcggctgtataaaaacaaagacatgatacaaactctaacaaacaaatctaaaatccaaaatgtaggagggacttatgaattgcatgttggggacaccatagacttgatattcaactctgagcatcaggttctaaaaaataatacatactggggtatcattttactagcaaatccccaattcatctcctagagacttgatttgatctcctcattcccttcagcacatgtagaggtgccagtgggtggattggagggagaagatattcaatttctagagtttgtctgtctacaaaaatcaacacaaacagaactcctctgcacgtgaattttcatctatcatgcctatctgaaagagactcaggggaagagccaaagacttttggttggatctgcagagatacttcattaatccatgataaaacaaatatggatgacagaggacatgtgcttttcaaagaatctttatctaattcttgaattcatgagtggaaaaatggagttctattcccatggaagatttacctggtatgcaaaaaggatctggggcagtagcctggctttgttctcatattcttgggctgctgtaattcattcttctcatactcccatcttctgagaccctcccaataaaaagtagactgataggatggccacagatatgcctaccataccctactttagatatggtggtgttagaagataaagaacaatctgagaactattggaatagaggtacaagtggcataaaatggaatgtacgctatctggaaatttctcttggttttatcttcctcaggatgcagggtgctttaaaaagccttatcaaaggagtcattccgaaccctcacgtagagctttgtgagaccttactgttggtgtgtgtgtctaaacattgctaattgtaaagaaagagtaaccattagtaatcattaggtttaaccccagaatggtattatcattactggattatgtcatgtaatgatttagtatttttagctagctttccacagtttgcaaagtgctttcgtaaaacagttagcaattctatgaagttaattgggcaggcatttgggggaaaattttagtgatgagaatgtgatagcatagcatagccaactttcctcaactcataggacaagtgactacaagaggcaatgggtagtcccctgcattgcactgtctcagctttagaattgttatttctgctatcgtgttataagactctaaaacttagcgaattcacttttcaggaagcatattcccctttagcccaaggtgagcagagtgaagctacaacagatctttcctttaccagcacactttttttttttttcctgcctgaatcagggagatccaggatgctgttcaggccttatcccaaccaaattcccctcttcactttgcagggcccatcttagtcaaatgtgctaacttctaaaataataaatagcactaattcaaaatttttggactcttaaattagctacttgcaggttcttgttgaaaggtatataatattacattgtaaacaaatttaaaatatttatggatatttgtgaaaagctgcattatgttaaataatattacatgtaaagctatttaaaagaggttttttttgtattttgtttaacaaaaattgctcaggagcatgctaagcctgaggccaagttgtttcttagtatgactttttaaaaaaacatctgctgagtagctacagggccaaagacttggagagcttgtttctgttgcatttgcatatcttctcaggaaattaaagtgtgtcatacatatgtgtgtgtgtgtgtgtgtgtgtgtgtatatgtgtgtgtgtatatatatgtatacttataaaatcttggtgttcttgatctttgttgtgttataagcaatgtgtgctggagtgggctggtgctagcttataagcacatattattaaattttcaggaatgttgcactttagttattaactataggcattcttgaaattggctatggtgggagtatttataccatgtaaattggcaaacactacacattttccttttggacagctagttcaccagcacaccactgtgaaactctccttaatgactcctctctgcccccgcttcattcctgggataatcatagcagactaagggagaaaatgaaattgtaaaaatttggcatactggtgatttctcagggcaagcagaggttactacagctgcagctagagggatgactaccaacaggtgacctttacattttcctgatgttataattttagcttttgttttcaatgtatactgttttcctgtttctccacatagtagtctgcattttaaatctataataaaacatgctgataactgg

SEQ ID NO: 122 - protein, 177 aa, Homo sapiens
MCLSHLENMPLSHSRTQGAQRSSWKLWLFCSIVMLLFLCSFSWLIFIFLQLETAKEPCMAKFGPLPSKWQMASSEPPCVNKVSDWKLEILQNGLYLIYGQVAPNANYNDVAPFEVRLYKNKDMIQTLTNKSKIQNVGGTYELHVGDTIDLIFNSEHQVLKNNTYWGIILLANPQFIS

SEQ ID NO: 123 - DNA, 2064 bp, Mus musculus
ttgtgggtatctgctttccccagttctcattccatcagagaacgagttctagcctcatggaggaaatgcctttgagagaatcaagtcctcaaagggcagagaggtgcaagaagtcatggctcttgtgcatagtggctctgttactgatgttgctctgttctttgggtacactgatctatacttcactcaagccaactgccatcgagtcctgcatggttaagtttgaactatcatcctcaaaatggcacatgacatctcccaaacctcactgtgtgaatacgacatctgatgggaagctgaagatactgcagagtggcacatatttaatctacggccaagtgattcctgtggataagaaatacataaaagacaatgcccccttcgtagtacagatatataaaaagaatgatgtcctacaaactctaatgaatgattttcaaatcttgcctataggaggggtttatgaactgcatgctggagataacatatatctgaagttcaactctaaagaccatattcagaaaactaacacatactgggggatcatcttaatgcctgatctaccattcatctcttagagattgggtttggtctcctcatcttcttctttgtatcccgagatgctggtgggtgggttggagggggatgattgatggcaatgcacacagtttgtgagggcttacaaattgacacaatcagagcctcttggcatataaaattttagccctcatatctgtctgaagaggactcagcaaatgggccaatccctaatgttgggtctgcaaatggacttgtacaatccatgataaaaaggagtatgggccacagaagacagaaactcttccaaagaatgtctttctaaccttgatccctgggtagaatgagatcctgtttccatgggagtcttacttggcttgcaaaaaagggtgtagggcagtagcttggccttttttccatcataatttccttgagctgttttaccttaatccctccaaactctcaccttctgagagcctcctaatgaaacattgttagactggtggggtggccaagacatgccaacaacacccttctttagaggtggtgtttttagaggacagagaacattatgaagcctagagcagcagaggtcaagatgccacgaaatggaattgatctgggaattttttttttttttcattctcaggatgcaggttcattctgaactttcccctaggccttcattgcttttgtgtgtatgtgtgcataaattctgcaaatagaaaaatgagagtttgcaccagtactcactagatttaacaccagaaagtggtacttttctggctgtattatgccatgatagcacattttctgttggtgttccctaactgacaagtataacagttttcctaaaccacacaacaatgctatgatgttaatggggtagatatttttggaaaaaaattgcacagtgagaacatgggtagatgaaccctaagactcttacctcaattcagaactcgcaaggagttaagtgagtggggtcttcattagaccattcacatggtctctgctttgaaactggcgttgctactgtctcattatacatcactaaaatggaattaactcaactttgaaatggatgcatcgactttaccccaaggtgtccagaatgaagctacaagacttttaccagcagtcattttccttttgcctggagcaagaagatccaggatactgttggaagagttcatctcactcaaccatgctgactttccaaagtaataatgaacatttgtgttcaaattttggattctgttaaatttagccagcttgtgagttcttgtcgaaaagtattttaaaccaatttacactatttatgggtatttgtgaaaagctatatagtgatattttatatataactaatttaaaatatttttattttatgtaacaaaaatactataggctaagctatttcttcttatttttttatgaatacttgctgaattgccatagggcacaaagactcttctgtttgcatatcttctcaggaaattaaaattgtatcacatgtatttataagaa

SEQ ID NO: 124 - protein, 173 aa, Mus musculus
MEEMPLRESSPQRAERCKKSWLLCIVALLLMLLCSLGTLIYTSLKPTAIESCMVKFELSSSKWHMTSPKPHCVNTTSDGKLKILQSGTYLIYGQVIPVDKKYIKDNAPFVVQIYKKNDVLQTLMNDFQILPIGGVYELHAGDNIYLKFNSKDHIQKTNTYWGIILMPDLPFIS

SEQ ID NO: 125 - DNA, 1852 bp, Homo sapiens
aatcctgagtaaggtggccactttgacagtcttctcatgctgcctctgccaccttctctgccagaagataccatttcaactttaacacagcatgatcgaaacatacaaccaaacttctccccgatctgcggccactggactgcccatcagcatgaaaatttttatgtatttacttactgtttttcttatcacccagatgattgggtcagcactttttgctgtgtatcttcatagaaggttggacaagatagaagatgaaaggaatcttcatgaagattttgtattcatgaaaacgatacagagatgcaacacaggagaaagatccttatccttactgaactgtgaggagattaaaagccagtttgaaggctttgtgaaggatataatgttaaacaaagaggagacgaagaaagaaaacagctttgaaatgcaaaaaggtgatcagaatcctcaaattgcggcacatgtcataagtgaggccagcagtaaaacaacatctgtgttacagtgggctgaaaaaggatactacaccatgagcaacaacttggtaaccctggaaaatgggaaacagctgaccgttaaaagacaaggactctattatatctatgcccaagtcaccttctgttccaatcgggaagcttcgagtcaagctccatttatagccagcctctgcctaaagtcccccggtagattcgagagaatcttactcagagctgcaaatacccacagttccgccaaaccttgcgggcaacaatccattcacttgggaggagtatttgaattgcaaccaggtgcttcggtgtttgtcaatgtgactgatccaagccaagtgagccatggcactggcttcacgtcctttggcttactcaaactctgaacagtgtcaccttgcaggctgtggtggagctgacgctgggagtcttcataatacagcacagcggttaagcccaccccctgttaactgcctatttataaccctaggatcctccttatggagaactatttattatacactccaaggcatgtagaactgtaataagtgaattacaggtcacatgaaaccaaaacgggccctgctccataagagcttatatatctgaagcagcaaccccactgatgcagacatccagagagtcctatgaaaagacaaggccattatgcacaggttgaattctgagtaaacagcagataacttgccaagttcagttttgtttctttgcgtgcagtgtctttccatggataatgcatttgatttatcagtgaagatgcagaagggaaatggggagcctcagctcacattcagttatggttgactctgggttcctatggccttgttggagggggccaggctctagaacgtctaacacagtggagaaccgaaaccccccccccccccccgccaccctctcggacagttattcattctctttcaatctctctctctccatctctctctttcagtctctctctctcaacctctttcttccaatctctctttctcaatctctctgtttccctttgtcagtctcttccctcccccagtctctcttctcaatccccctttctaacacacacacacacacacacacacacacacacacacacacacacacacacacagagtcaggccgttgctagtcagttctcttctttccaccctgtccctatctctaccactatagatgagggtgaggagtagggagtgcagccctgagcctgcccactcctcattacgaaatgactgtatttaaaggaaatctattgtatctacctgcagtctccattgtttccagagtgaacttgtaattatcttgttatttattttttgaataataaagacctcttaacatta

SEQ ID NO: 126 - protein, 261 aa, Homo sapiens
MIETYNQTSPRSAATGLPISMKIFMYLLTVFLITQMIGSALFAVYLHRRLDKIEDERNLHEDFVFMKTIQRCNTGERSLSLLNCEEIKSQFEGFVKDIMLNKEETKKENSFEMQKGDQNPQIAAHVISEASSKTTSVLQWAEKGYYTMSNNLVTLENGKQLTVKRQGLYYIYAQVTFCSNREASSQAPFIASLCLKSPGRFERILLRAANTHSSAKPCGQQSIHLGGVFELQPGASVFVNVTDPSQVSHGTGFTSFGLLKL

SEQ ID NO: 127 - DNA, 1250 bp, Mus musculus
ctttcagtcagcatgatagaaacatacagccaaccttcccccagatccgtggcaactggacttccagcgagcatgaagatttttatgtatttacttactgttttccttatcacccaaatgattggatctgtgctttttgctgtgtatcttcatagaagattggataaggtcgaagaggaagtaaaccttcatgaagattttgtattcataaaaaagctaaagagatgcaacaaaggagaaggatctttatccttgctgaactgtgaggagatgagaaggcaatttgaagaccttgtcaaggatataacgttaaacaaagaagagaaaaaagaaaacagctttgaaatgcaaagaggtgatgaggatcctcaaattgcagcacacgttgtaagcgaagccaacagtaatgcagcatccgttctacagtgggccaagaaaggatattataccatgaaaagcaacttggtaatgcttgaaaatgggaaacagctgacggttaaaagagaaggactctattatgtctacactcaagtcaccttctgctctaatcgggagccttcgagtcaacgcccattcatcgtcggcctctggctgaagcccagcagtggatctgagagaatcttactcaaggcggcaaatacccacagttcctcccagctttgcgagcagcagtctgttcacttgggcggagtgtttgaattacaagctggtgcttctgtgtttgtcaacgtgactgaagcaagccaagtgatccacagagttggcttctcatcttttggcttactcaaactctgaacagtgcgctgtcctaggctgcagcagggctgatgctggcagtcttccctatacagcaagtcagttaggacctgccctgtgttgaactgcctatttataaccctaggatcctcctcatggagaactatttattatgtacccccaaggcacatagagctggaataagagaattacagggcaggcaaaaatcccaagggaccctgctccctaagaacttacaatctgaaacagcaaccccactgattcagacaaccagaaaagacaaagccataatacacagatgacagagctctgatgaaacaacagataactaatgagcacagttttgttgttttatgggtgtgtcgttcaatggacagtgtacttgacttaccagggaagatgcagaagggcaactgtgagcctcagctcacaatctgttatggttgacctgggctccctgcggccctagtagg

SEQ ID NO: 128 - protein, 260 aa, Mus musculus
MIETYSQPSPRSVATGLPASMKIFMYLLTVFLITQMIGSVLFAVYLHRRLDKVEEEVNLHEDFVFIKKLKRCNKGEGSLSLLNCEEMRRQFEDLVKDITLNKEEKKENSFEMQRGDEDPQIAAHVVSEANSNAASVLQWAKKGYYTMKSNLVMLENGKQLTVKREGLYYVYTQVTFCSNREPSSQRPFIVGLWLKPSSGSERILLKAANTHSSSQLCEQQSVHLGGVFELQAGASVFVNVTEASQVIHRVGFSSFGLLKL

SEQ ID NO: 129 - DNA, 4778 bp, Homo sapiens
cgagactccatctcaaaaacaaaacaaataaacgaacaaaaaaacccacaacgtattattttcttgtttacgaggtttcttgtctctctggctccaccagaagaggagcagggacccttcttgctgttgttcattgctgcatcccccacaccgagagcagagcctggcatgggcagaaagtcctcagtcgatatttggtggccccaagcgaatgaagcatccaagaagggaaagctgggggctccccactgcacttgccacctgagtcacattttcagaagcctctggaaagtcgtgcacagcccaggagtgttgagcaatttcggtttcctctgaggttgaaggacccaggcgtgtcagccctgctccagacaccttgggcatggaggagagtgtcgtacggccctcagtgtttgtggtggatggacagaccgacatcccattcacgaggctgggacgaagccaccggagacagtcgtgcagtgtggcccgggtgggtctgggtctcttgctgttgctgatgggggccgggctggccgtccaaggctggttcctcctgcagctgcactggcgtctaggagagatggtcacccgcctgcctgacggacctgcaggctcctgggagcagctgatacaagagcgaaggtctcacgaggtcaacccagcagcgcatctcacaggggccaactccagcttgaccggcagcggggggccgctgttatgggagactcagctgggcctggccttcctgaggggcctcagctaccacgatggggcccttgtggtcaccaaagctggctactactacatctactccaaggtgcagctgggcggtgtgggctgcccgctgggcctggccagcaccatcacccacggcctctacaagcgcacaccccgctaccccgaggagctggagctgttggtcagccagcagtcaccctgcggacgggccaccagcagctcccgggtctggtgggacagcagcttcctgggtggtgtggtacacctggaggctggggagaaggtggtcgtccgtgtgctggatgaacgcctggttcgactgcgtgatggtacccggtcttacttcggggctttcatggtgtgaaggaaggagcgtggtgcattggacatgggtctgacacgtggagaactcagagggtgcctcaggggaaagaaaactcacgaagcagaggctgggcgtggtggctctcgcctgtaatcccagcactttgggaggccaaggcaggcggatcacctgaggtcaggagttcgagaccagcctggctaacatggcaaaaccccatctctactaaaaatacaaaaattagccggacgtggtggtgcctgcctgtaatccagctactcaggaggctgaggcaggataattttgcttaaacccgggaggcggaggttgcagtgagccgagatcacaccactgcactccaacctgggaaacgcagtgagactgtgcctcaaaaaaaagaaaggaagaaaaaagaaaactcaggaaacagatcttgggggacactccagggaacccaaaactcaaaggcggagagctcagtgggcaccaccaaggcgagatgaagccccagcaggcaccttcagaagacccacgtagactgcagaccctgccacggacaatactaaggacaaaaacccagagacttggggtctgtgggcccccaaacatggggtaaagttgatttgcctgatattcaggaagaaggggtgaggggtgggtatttatgcttttgattcagaagaaagtggggcttgggattccagggacttggctgggggtgggaaacttcatccacttccctactctcatcatgagtacggacagggtgggcgggagactgatcatcgggactcatcatgaagagcccagccccaccccacatactcagatcccacccacagactggtggccacacctcagcctggtcacaaagagttacactcagatacatgagcacggcagcgtgctcataactgtttaacaaccagctgtcctgggagggggacagctttgtaatgtttgccaatttccatggtgtaaatgctaccaccatggctgatttcatcactgccaagcatagacatccctaataggacaccacggatctgtccccggcatccggcccagggcctggcacaaagcatgctctagggaaatgcttgctgattgaaaggaaggaagaatgactctacagtcacacctatggcatcccacaaaatctgtcacatggctgcataatctcagccactctttcacaactatagactcatacacgcgaagtgccagattcatgcacaaccacacaatcacatggaagtcacagacggcatcacagacagtcacagcactgtgtgtatgttataacacaagcacacaaaactcagacagcatcccagctacacagccactcccagaggtgtcaccgtcacacttggtaattaatactcattacattagacacagacagaccaagttatagtcagacctggttacacacatacacacacacaatatcaccatgacaaatacacattacacacacacaacatcacaatgacaaacacacattacacacacaacatcacgatgacaaacacacattacacacacaacatcacgatgacaaacacacattacacacacatcacaatgacaaacacaacattacacacacacaacatcacaatgacacacacatcacacacacatcacaatgacaaacacacaacattacacacatatacacacagcctgagggccctccccagcccagactaacacatctcggggtgaggaccagaccttgttcataaccctgggcctcttaaccactgatctttgaaataaatggcaaatagttgtacctggatctgtctagttcttaggggaacaaactgaagaagggtggagaggaattgtcaggcctaaagagccccacagggaaagggaggagtcggatggggggcaaccatcagcaacaagtggtggctcctagaggcagagggatggaggtaatgacccatggaggtcattctacagatgaggaacctggacccagttggctcaagtccatgcaggaaatgtgggggaaaccagagacctcacgtctggatctggcttcctctccaatccacaattcctgaggaagtagaggctacatcccgcaagacgcccttattagacacatccaggacagaatgacaatccgccaagccagctggaagcataaaacacagggagctggtgggttgggtgggggcagataatgatatgcatacaaattagagggtctatgcaaatgagcattgctgcagtgtggctggagggaatccttagttcctaggattctaggatatgggtttcgaccccagaggtgaatgtattgttattattgttttgttgttgttgtgaatgacaagtcaaaatttgtgggttattgttgttatcgccaatagtattcttgtcattgttgcacagtacagagatgaaggaaacagattttgcaatcagatgatcctgggttctgagtccactctgccactcaccagctatatgacctccagcaatttccatcacctctcaatgcttcagtttccccatcggcaagatggttgtggggggagaggaacaacagtacagattcaccatcccaaattcaaaatgctccaaaatctaggccgggcgtggtggctcatacctgtaatcccagcactttgggaggtcaaagtggacggataacctgaggtcaggagctccagaccagcctggccaacatggcgaaaccccatctctactaaaaatacaaaaaattacctgggtgtggtggggggcacctgtaaccccagctactcgggaggctgaggcaggaaccctggaggttgaggttgcagtgagctgagatcacaccactgcactccagcctgggtgacagagcaaggctcccatctcaaaaaacaaaaaaacatgctccaaaatctgaaactctttgagccccagtgtgatgccacaagtgggaaattccacaactcatcacatgtgatagattgcagtggaaatgcaggcacacaccacgaagtttactcagcatcctcaaaggaaatccccgtcagtagctatatatcattttctcacatgccagataggtatctctcatcttttactgttaggtacttctgtgttgaataggtggaggaaaatgattgctggttagtagtatataaattcagagtcaggaaggatggtgatgtcggctgggtgcagtggctcatgcctgtaattccaatgtgataccctaccttgtgtttaacgtgattgactctcccttagctgagagggccaggcagactctattttggcttcttcgcttgcagtctctcacccaccccccttcctcaaggacttaagctgactcccagcacatccaagaatgcgattactgataagatactgtgacaagctatatccacaattcccaggaattcgtccggttgatagcacccaaagcccccgcgtctatcaccttgtgatagatttaaagcccctgcacctggaactgtttgtttttctgttaccatttatctttttcactttcttgcctgttttgcttctgtaaaattgcttcagctcggctccctcttccccttctaaaccaaggtataaaaagaaacctagccccttctttggggtggagagaattttgagcgctagccgtctctcagtcgccggctaataaaggactcctgaattagtctaa

SEQ ID NO: 130 - protein, 240 aa, Homo sapiens
MEESVVRPSVFVVDGQTDIPFTRLGRSHRRQSCSVARVGLGLLLLLMGAGLAVQGWFLLQLHWRLGEMVTRLPDGPAGSWEQLIQERRSHEVNPAAHLTGANSSLTGSGGPLLWETQLGLAFLRGLSYHDGALVVTKAGYYYIYSKVQLGGVGCPLGLASTITHGLYKRTPRYPEELELLVSQQSPCGRATSSSRVWWDSSFLGGVVHLEAGEKVVVRVLDERLVRLRDGTRSYFGAFMV

SEQ ID NO: 131 - DNA, 1869 bp, Mus musculus
ttttgcagtttgcacagcccgagcgtgttgggcaattgtggtttcctccggagaggaggaactcaggcttgccaaccctttccctgggcttcggagcctcagctgctctggcatggagagtgtggtacagccttcagtgtttgtggtggatggacagacggacatcccattcaggcggctggaacagaaccaccggagacggcgctgtggcactgtccaggtcagcctggccctggtgctgctgctaggtgctgggctggccactcagggctggtttctcctgagactgcatcaacgtcttggagacatagtagctcatctgccagatggaggcaaaggctcctgggagaagctgatacaagatcaacgatctcaccaggccaacccagcagcacatcttacaggagccaacgccagcttgataggtattggtggacctctgttatgggagacacgacttggcctggccttcttgaggggcttgacgtatcatgatggggccctggtgaccatggagcccggttactactatgtgtactccaaagtgcagctgagcggcgtgggctgcccccaggggctggccaatggcctccccatcacccatggactatacaagcgcacatcccgctacccgaaggagttagaactgctggtcagtcggcggtcaccctgtggccgggccaacagctcccgagtctggtgggacagcagcttcctgggcggcgtggtacatctggaggctggggaagaggtggtggtccgcgtgcctggaaaccgcctggtcagaccacgtgacggcaccaggtcctatttcggagctttcatggtctgaaggctgcggtgacaatgtattttgtggagggacctctccaggactcacctcaaacccagcaatagggtttgaagtcctccctttaaggagccctgaactctgcagtgctcggggcggtgtagactgctgacctgctttgggcaatcttcaaatcagagacctggagacttggggcgtggagcccaggagcgaggggtcagctcatttgcctgatattcaggaagaaagaatcaagctggggtatttatgcttctgatgcaaacactgagatttcggctttctgggttttgagctggaggcaagaaaccttcccagagtgtcatcaggaccatgttggcaggacttggggctccagacttgccaccacactctggcctctcccatccatccgctgcattggtttccagccaccaaaacagcactggccccctggctgcaactggccaggtacgagcttctgagcacctacattcctcagggacatcttgatgagatctcagtactcagtccaatgcgcagcagcgacagacatgccaggaatggttggtcagaagggaagggaggaaagggaggaaagaagggaatgcagaagagaaggggggaaaacaagaccaaaacaaaacagcaacaacaaagcggcagggaggaggtgacacccttggggatactttagtcaacacacttagaacagattgtgccaggcctgttggattcctggagttgatgggatcgtgggaaggcacaatggggagcaagtgggcttgggttatggctcagtgggtaaagtgcaattatggggatctgagtttgaatccctggtacccatataaagacacagatgcggtgatgggcacttgtgacaatgagatcatcaatagggaatggagacaggagggacctctggggttcactggccaggcagtctagctgaatcaaagagctccaagttcagtcgatagctcctgaagatgacaactgaggctattctccaaaccccacacgcaggacacatgcgtaataaataaaattttaaaaat

SEQ ID NO: 132 - protein, 239 aa, Mus musculus
MESVVQPSVFVVDGQTDIPFRRLEQNHRRRRCGTVQVSLALVLLLGAGLATQGWFLLRLHQRLGDIVAHLPDGGKGSWEKLIQDQRSHQANPAAHLTGANASLIGIGGPLLWETRLGLAFLRGLTYHDGALVTMEPGYYYVYSKVQLSGVGCPQGLANGLPITHGLYKRTSRYPKELELLVSRRSPCGRANSSRVWWDSSFLGGVVHLEAGEEVVVRVPGNRLVRPRDGTRSYFGAFMV

SEQ ID NO: 133 - DNA, 6583 bp, Homo sapiens
agaggtgcctccaggagcagcaggagcatggccgaggatctgggactgagctttggggaaacagccagtgtggaaatgctgccagagcacggcagctgcaggcccaaggccaggagcagcagcgcacgctgggctctcacctgctgcctggtgttgctccccttccttgcaggactcaccacatacctgcttgtcagccagctccgggcccagggagaggcctgtgtgcagttccaggctctaaaaggacaggagtttgcaccttcacatcagcaagtttatgcacctcttagagcagacggagataagccaagggcacacctgacagttgtgagacaaactcccacacagcactttaaaaatcagttcccagctctgcactgggaacatgaactaggcctggccttcaccaagaaccgaatgaactataccaacaaattcctgctgatcccagagtcgggagactacttcatttactcccaggtcacattccgtgggatgacctctgagtgcagtgaaatcagacaagcaggccgaccaaacaagccagactccatcactgtggtcatcaccaaggtaacagacagctaccctgagccaacccagctcctcatggggaccaagtctgtatgcgaagtaggtagcaactggttccagcccatctacctcggagccatgttctccttgcaagaaggggacaagctaatggtgaacgtcagtgacatctctttggtggattacacaaaagaagataaaaccttctttggagccttcttactataggaggagagcaaatatcattatatgaaagtcctctgccaccgagttcctaattttctttgttcaaatgtaattataaccaggggttttcttggggccgggagtagggggcattccacagggacaacggtttagctatgaaatttggggcccaaaatttcacacttcatgtgccttactgatgagagtactaactggaaaaaggctgaagagagcaaatatattattaagatgggttggaggattggcgagtttctaaatattaagacactgatcactaaatgaatggatgatctactcgggtcaggattgaaagagaaatatttcaacaccttcctgctatacaatggtcaccagtggtccagttattgttcaatttgatcataaatttgcttcaattcaggagctttgaaggaagtccaaggaaagctctagaaaacagtataaactttcagaggcaaaatccttcaccaatttttccacatactttcatgccttgcctaaaaaaaatgaaaagagagttggtatgtctcatgaatgttcacacagaaggagttggttttcatgtcatctacagcatatgagaaaagctacctttcttttgattatgtacacagatatctaaataaggaagtatgagtttcacatgtatatcaaaaatacaacagttgcttgtattcagtagagttttcttgcccacctattttgtgctgggttctaccttaacccagaagacactatgaaaaacaagacagactccactcaaaatttatatgaacaccactagatacttcctgatcaaacatcagtcaacatactctaaagaataactccaagtcttggccaggcgcagtggctcacacctgtaatcccaacactttgggaggccaaggtgggtggatcatctaaggccgggagttcaagaccagcctgaccaacgtggagaaaccccatctctactaaaaatacaaaattagccgggcgtggtagcgcatggctgtaatcctggctactcaggaggccgaggcagaagaattgcttgaactggggaggcagaggttgcggtgagcccagatcgcgccattgcactccagcctgggtaacaagagcaaaactctgtccaaaaaaaaaaaaataaaataataactccaagcctttaaaaaatatcatctgaaactgttacatcagatttctggcactctactgactgtggaagatagccagctgactggaagatagccagctgattagttccctgaagaaacctgaagacagatacctggttaactagatcaactacactgccaacttgtttgatgctgagagacaatggacttattccatgggggaagggaaaaaagaagtcaatcaccaaatctgaagaagttaacctagatctttgaggtttgatttgcaactttatatgcagagtattatgtgggtattttcccttaaaatattcaaagggatttacatatgggattagctaatgagcctagccaagaccttccctggaggacaggctggtcattgcggaggtcccttctgtgcttcagtgggttcatatcctctagtccgtatgattttcctacgctaatatgtcaagggcaggagaggcagctctgttctcctagcctttgttgacttgtctgcaaagcaggaatctgcccatttgtttccaaggagcaaatgagctcatgagaatgaaagatgttaacttcatgcattctgtgccatctgagcatttcggtattatatgactggtgacccttggcccgtattataaatgcttcctatcctgggagacctcatggatgagtctgagaggaaatttggcaccaaaatcactctcactctggtttccagtagactatagaggcagagaggcatttgagaggctcctgagcaaagtgtccagtgtagcaggagcacttcattaatatttattgagttataattaaataaaaattaatttctgatttctcagtttggaggttaaggctctaaatatattttctaacctctgctaggctaacttaagccaggcctttttcttgccttccctttctcaaaacagtcagcacagactcagtgggagcacagaggagtgtggtcacctccacctggctcaccagagtcttcatagaggaagtgaagcctggaagaaactgggcgggccccagatgaccacagggaaagggcatctcagatggaggaattacccttgacttaaagcagaaaagaaagatttctcagtaactccaaaacttgcttgataggagaatattccctcaaccaattcctaggacaatatttattggtagatcaagaatgtttcctcaataactctagtctagctccatgatcagaactaacacccattaaaaacataaaatgttctttctgaaccggtcttcatggtgcgtgagagcaccaagcagctttggtatgcaggaggagttttgcacagaagagtggcctgctcaaacctgcccactgttctgtaggtgatctggtggatctggaaatttatcccaagacaggaatttcctaatattcgaagacatttgaggctttgggaaattctctgctgtgcatttatttggctcctgtcataagcttgttttttaaagaatgtatcatagctcaagtttttactgctgattttgttaaattctgtatagtatattttttacggaaaggcacagtcagacattcctaatagggctcatgtcagaacttctgttcccaaggcattatctccatagcaaaaattagtgcactgttttcaaaagtgaggtgggaaaatgcttttaagatcatgtgatgttcccctaaaaggggttaatggggtgtattcagggtttgggagggaggaagaagcatgctttagaaaacagtaaatttagggagaaaatgctttgttggttaaatgtcactcaaaaggctgaattcaaatcaattccacaaacatttactgagtacctactgcccctggggacacagagataaattatttagtctcagacacactcattctaacttcccagcacctctactgtctgcagattctttaatttattttggttgtattagctaattaattcgtaaactttaggcacatggatctattctcattatgaaaatggatgccatttgattaaggctgatgactaacaaaatgatttgtgtttactcgaagtgtttttttaaaaatagctactcaaggatagttttccataaatcaagaaggtaaaaaagttcccattttttattgtagaatccattatttaaactacatgtagagacaggttattatttgctatattcaagtttggtcatcaatacccttaaaaatattagaattttatggatgacccagaaatgctttgaaaatctgtgttcctcagcaaatacagagaccatgatcaaaatgcacagaatcactaacattttgatgctagcatggtttcagtctatttggcagaacagaattgattatgctactaaaatttctttttctttttttttttttttttttttgagacagagtcttgctttgtcacccaggctgaagtgcagtggcaggatctcagttcactgcaacctctgcctcccaggttcacgccattctcctgcttcagcctcccgagtagctgggactacaggctcccaccaccatgcccggctaattttttgcatttttagtagagacggggtttcaccgtgttagccaggatggtctcgatctcctgacctcgtgatccgcccgcctcagccttccaaagtgctgggattacaggcgtgagccactgtgcccggactctgattttttttttactaaggtacagtaagaaaagggaaaagtgtacgttttcacttcctgaaatatgtcaggttgaatcaataatagagcacaccagaactcttggctccatttcaacctaaactattcagttctcatcaccccagaggaaattccgcctctgtgctggtcagtaatccccctggattataaaagtttaactaactcactgtgcacaaggcacggccattgccaacattctcttgcaaggtattttcccaagcccttacccaattctgtttccatgattgtgacattggggattaattctgcaagacagaactgtttatattctgtaccttaaaaacacatgcaaacatctcttgccttaagatttctggctttcctatggcccagagtcctagaagtgttttgatatttgtagcagaattttcaagtgtacatccttatcctggatattaacatttttgcatcatattggcagctggacctacagagaatttagtagactgttaacctaataagccttgaatccttttgcaccagtggtgagagaatgtggatcagagccatcacctccatgccccgtcaccctctaacaaccacatttacaacttccccagctctgagacacacttgcctccaccccttccatcaccccattttaagatgaaaataccacaccagcctggaaggaagaagttacttgcccagggccacatagtgagttaagggctgatctagagctaggaagctgtcttcctgaaccataatcctggactcttctaacctctctactcatcgcaaatagagttcattttagtgatttgaaggaagatgggacaagtattttcaaacacctgtaggacaacatggaagtgggaggagacttctactgtagctccccagagaagagagctagggctacagagttgcagttacaaggttgccctctctggcttgatccccaaaggaattttctactccaaaatagaatttttctaggatgctatttctcagtccctggagatactcaaacaaagggcttgtcacaagggtttttgtagaagctattcttcacagaggttgggggagagattaagccaaaggatctctgaggtctttttcaaatctataattatgtggccttttgttcattgacttccatgtgttctagttgatcattacaaacctggcaggccttctcaagggttcagtaattagctgtcatttcccatttgtccagagagtgtccaacacaaaatacccctaagatcttggccaatagagaaatgtcatggaattttagaaatgacagtatctgcggagtttattccaagttatatcatttcaaagatgaagaaacccaggctcagagggagccatcacatccacaccctgtcacccttcgtggccagtgccagacagtagctagttggatgctaaaagtagaatttagatatcttaacaataagcccagcagtctttcaacttcattcgtaaatcatttttgttttgagcatctgtcacgtggcagcacttgcctggatactggagagctgagaaggaatgcgacaggcaagtcctactctcacagtgtatacattcaggaggaacaagacacacagtgccaagtaaataaagtagctgaacttcatcaaatgattttattcttaaagtcattaaagcatgtaatgttcccctttttttgtttcaggggtgtacagattgaagaagtgtaggtgtttatgtggttttagtgacaaaccccatgtgctttcattgattttatgttttatgttaaaacatcaaccgcaaggtaaaatgcatattgtatgttgttggatacgtacttaactggtatgcatcccatgtctttgggtactagtgtatgaattctaatctctgtaaatgaaatgttgtatgtgttaatatatttaatagatgtaacttaataaactggcattgaagactgaa

SEQ ID NO: 134 - protein, 251 aa, Homo sapiens
MAEDLGLSFGETASVEMLPEHGSCRPKARSSSARWALTCCLVLLPFLAGLTTYLLVSQLRAQGEACVQFQALKGQEFAPSHQQVYAPLRADGDKPRAHLTVVRQTPTQHFKNQFPALHWEHELGLAFTKNRMNYTNKFLLIPESGDYFIYSQVTFRGMTSECSEIRQAGRPNKPDSITVVITKVTDSYPEPTQLLMGTKSVCEVGSNWFQPIYLGAMFSLQEGDKLMVNVSDISLVDYTKEDKTFFGAFLL

SEQ ID NO: 135 - DNA, 5777 bp, Mus musculus
atcagaagtctctccaagacagcagaaggatggcagaggagctggggttgggcttcggagaaggagtcccagtggaagtgctgccggaaggctgtagacacaggccagaggccagggccgggctagctgccaggagcaaagcctgcctggctctcacctgctgcctgttgtcatttcccatcctcgcaggacttagcaccctcctaatggctggccagctccgggtccccggaaaagactgtatgcttcgggccataacagaagagagatctgagccttcaccacagcaagtttactcacctcccagaggcaagccgagagcacacctgacaattaagaaacaaaccccagcaccacatctgaaaaatcagctctctgctctacactgggaacatgacctagggatggccttcaccaagaacgggatgaagtacatcaacaaatccctggtgatcccagagtcaggagactatttcatctactcccagatcacattccgagggaccacatctgtgtgtggtgacatcagtcgggggagacgaccaaacaagccagactccatcaccatggttatcaccaaggtagcagacagctaccctgagcctgcccgcctactaacagggtccaagtctgtgtgtgaaataagcaacaactggttccagtccctctaccttggggccacgttctccttggaagaaggagacagactaatggtaaacgtcagtgacatctccttggtggattacacaaaagaagataaaactttctttggagctttcttgctataaggaggagaaaaccatcattccaaggggctcccctgcctcctactttccaatttccttttctcatatggatctataaacaggggctttagagggatcagggaaggggacagtggtttagctatataatttaggaacccaatattgatccgtatatgccttatggactaaaatagtaaatggaaaacccagtacagctcatgtttgatagagacctgctgggttttaaaaattgaaacacgcctcatccaatggcacaatctactgatttcaggacagaacctttccacagtgccctctgtccaagtcctttctgaattcagcagttcagttagagctgaattcgacaatgaacttactccagatcaagagctaaagacagaatccaaagaaagactgagaaaatgatgttatttctccaagaggcaatgcatttccacattcttttgtgcctaacctaaaaaataagaaagaagaaaggaaggaaggaaggaaggaaggaaggaaggaaggaaggaaggaaggaaggaaggaaggaaggaaggaagggacaagaaaagacaagacaagacaagaaaaaagaaaaaatggtatttctcgtgaatattccctaaaaggaattggttttctgctgtgaaggagaaacctcacctttcttctgattgcatcctttagtatccaaacatacaagtgggaattccaaatgcacatggaacatagaacacttttattattgtgagaacatgtttattgagtacctactatgctctgggcactcagcccacaggaccatgaagagaaagtcaaattttcttaaaaactaaatgaatcctcaatacatacttcctgatcaactaccactcaaaatgtataacttccaaagtataacttcaagtcagccatctaggtggtttcttgggtaaaggtgcttgtcattaagcctgacacctgggtttgacctcccagaacccaaaagctggaaggagagaattggttcccacaaattatcctcaaacccccatacaaatgatgtggcatgcacacatgtaactaaataaataagtgtaaaacaaaaacaaaaacaaaattttaaagaaaaatttcaagtcctgaaagacagcattcctgagaatgttgtctccatcgttgtccagtataggctaaccagctgatagagacactgaaggaatttaaagacagacatcaagtgaaatggagcactgtagaaacacttgattcatgccaggagtcaatgtactatgaagaccaacaacaaagtgtcagtcatcaaatccagaggtgtttatctagatctgctttcaagtttggtttgcagcctttatatagtctctattacaaatgctcgtgtcatggtagatgccacaaggagtcagagggtaaacttagccccaaaccactgctgagccatcttctaggaaaccttcgaagcagagctgggcagcgtgactcccacacaatgactgggaaagtagtagctgatcaaaatttgttgagtaataatttgttagaaaattcatctccactgcctactaaacctaagttgtatactatctagcttctgctaagccaacttacattggccactttttctgtcttcaacttcttgaagtatcacaggtctcagtgagaacacagggaaaggtgaggtcgccttcccctggttcttcataggggaaaccacacctgaaagaagatgagcagcctgaggtgacctggaggaagggctgtctcagaagaaggacttattttttggcttaggtctaaaaccttgagagtaatgctcactggtcaattgaggatgctttatcaatgactccagtctgactccaaggtcagaaaggagagtgagatgctctctctgcctgcatatatcttcatggaacatgagaatattgagcaacatagacttataggaaaacacttgcccaaaagtagccagagtgacctggtcatcccctctactaaacccaagctttgtgtcaagggccttcaaagctgcccagaagtgatctggatggcttgggaatttatccaagacaggaatttcctgacagccaaagatgcttgagtccttgtgcctgacatgcatttattttgcccctgtttattgaagactgtaactgttgatttgtgggtatacatacatacatacatacatacatacatacatacatacatatgctgtcatgaaggcagcatcaaacattactaattggactcaaaccagcatttctgtttccaagatactaagtattcccatgcaaacaggagcatgctatttttctaaagcaaaatgaaaaaaatagttttgaaagtatatatatgatggagtcaagtgtaatggcatacatctgtaaacccagcacatgggatgctgagccaggaggattgccgtgagtttgaggagaacaggggctaaatagtaattttcaggaaagccttgcctatataacaagaccttgtctcaaatgaaaaaaaaaaaaaaaatagaccccaggctggtccttggagataaggtaatatattcattgggtgagggggtgtgtgttttggaaaatagttaatttagtgagaaatgcttttcggtcaaatgcatctcaaaggctgctgaattcaaatcgggtctgtaaatgcttacctagtgcttgcttgccctggggacagagacataaattactttagtctcagatccactcgttctaacagattggcatctccatcgtctgtggagcttttaatcactctgtttgtattagctaattaattagctaacttgagacacactgatattttcttattataaacatgggtgccatttgataaaagacaatcattaacaaaatggttcgaatttccgcttaagtgatcttcttttttccttttcattttttttaactagctaatcaaaggtagtttcccaaaaataaatgcaaagggagtataaagaaaaaattccctgtggtgggagctagtattgaaacaacagtatcaaagaggctgttacctactggcctcaaattttggcaggaacgcctttgaaaatgttagaactttacggacagcctagaggtgctttgaaaagtctctgttgccaacaaaagccattaatcagcatgcggcacaggttactcaaattttgaccttgactgttttttagatctgttacacagaacacaacttctgggctgtaatctctgatgtggatttggtgatttactaaggtaccgtgggaaacaaggaaagtgtacttgtaccacatcgtttctcagtgcatgtcagagtctactcaacagcagggcatgccagagccttggatacattccgggacaaactatgtcactcctaaggaaattccaagtgtgtgcctgtcaagcactctggatcatagaagcccacgagttcactgtgcacaaggcacagccatggccagcactctcttgcatggtatttctcttaagctcttactcaatcacggtcccatgattgtgacattggggattaattgcttgagcaggtttatttacagtctgttccttgcaaaatacatgcagatatgtctggcctcaaaatcccctgattgttttagggcttagagaatactggggatgtttttgctgttttcagatgtactttatttaagcttgcagaattaccctgaatattaacagtgttctaagatattgcctgctagcttctggctaatttactagtggtgacagtatcagatcagagtatctatatttatgtcttgctattatagttaaaacttcctgatctctgtaacacactcacccctacctcatctatctacccatcttgtggatgtagctgtgagaagactcacaagcccgagttgcagttacttttctgaagcaacatagtatgttaatggaatggccagaactctactcttggcacatggcactgaatttgatgccactaaaagaaaaattgaaggcagaaatattttttactatgcatgggacaacgtagaagagcaaggagactgcttacacatggtggtcacatctctggcttcatccctaaaccaattttctgaccccaagtcgattttttttcatgtagttattgttcattttctggaaagagtcaagcaaaaagagagttttatagaaaccattgcatcatggaggtcaggggagggattaagccaaagaattccttctccaaatctatagccatatggccaccctttggtgtacttctatttgatcatgacaaacctgagagccctgcccagagttcagtggatcctaatgaactccaagagtaattcattccctcaccaactctaggggcttggccagtgcagaaaatgtcatgggattttaaagttaacatgagctgctatccaaacttatgtctctttaagaatggagagacacaggccaggagaggtaacatatgaagcctggtattgggcagtagcttgatggagtattgaggctaaaagtagacttcctgcccctgaccatacacaacaccctttcagtttgatccatggtggtcttattctactttattttgagcacctgtcacacctagttactgtcatgccaagaaggtccataacaggcaaatcctactctgctgtgtgcacacaagaggaaggaggctcacagtagcaagtaaacagataagcaaacgtacacgattttcgtcttaaagtcattaagacacacgcgtacccctcttttgtttcagagggtatacaggctgaacagatgtcagtgttcacctattcttattgataagccccatgtgctttcattggttgaatgttttatgttaaaacgtcatattgccatcgtaaaatgcatattgtatgttgttgggtatataattaactaatatgcatcgcatgtatgaattctaatctctgtaaatgaaaacttatatatgttaacatatgtaatagttataatttaataaactgacactggagactac

SEQ ID NO: 136 - protein, 252 aa, Mus musculus
MAEELGLGFGEGVPVEVLPEGCRHRPEARAGLAARSKACLALTCCLLSFPILAGLSTLLMAGQLRVPGKDCMLRAITEERSEPSPQQVYSPPRGKPRAHLTIKKQTPAPHLKNQLSALHWEHDLGMAFTKNGMKYINKSLVIPESGDYFIYSQITFRGTTSVCGDISRGRRPNKPDSITMVITKVADSYPEPARLLTGSKSVCEISNNWFQSLYLGATFSLEEGDRLMVNVSDISLVDYTKEDKTFFGAFLL

SEQ ID NO: 137 - DNA, 2737 bp, Homo sapiens
aaaccctctgtaaagtaacagaagttagaaggggaaatgtcgcctctctgaagattacccaaagaaaaagtgatttgtcattgctttatagactgtaagaagagaacatctcagaagtggagtcttaccctgaaatcaaaggatttaaagaaaaagtggaatttttcttcagcaagctgtgaaactaaatccacaacctttggagacccaggaacaccctccaatctctgtgtgttttgtaaacatcactggagggtcttctacgtgagcaattggattgtcatcagccctgcctgttttgcacctgggaagtgccctggtcttacttgggtccaaattgttggctttcacttttgaccctaagcatctgaagccatgggccacacacggaggcagggaacatcaccatccaagtgtccatacctcaatttctttcagctcttggtgctggctggtctttctcacttctgttcaggtgttatccacgtgaccaaggaagtgaaagaagtggcaacgctgtcctgtggtcacaatgtttctgttgaagagctggcacaaactcgcatctactggcaaaaggagaagaaaatggtgctgactatgatgtctggggacatgaatatatggcccgagtacaagaaccggaccatctttgatatcactaataacctctccattgtgatcctggctctgcgcccatctgacgagggcacatacgagtgtgttgttctgaagtatgaaaaagacgctttcaagcgggaacacctggctgaagtgacgttatcagtcaaagctgacttccctacacctagtatatctgactttgaaattccaacttctaatattagaaggataatttgctcaacctctggaggttttccagagcctcacctctcctggttggaaaatggagaagaattaaatgccatcaacacaacagtttcccaagatcctgaaactgagctctatgctgttagcagcaaactggatttcaatatgacaaccaaccacagcttcatgtgtctcatcaagtatggacatttaagagtgaatcagaccttcaactggaatacaaccaagcaagagcattttcctgataacctgctcccatcctgggccattaccttaatctcagtaaatggaatttttgtgatatgctgcctgacctactgctttgccccaagatgcagagagagaaggaggaatgagagattgagaagggaaagtgtacgccctgtataacagtgtccgcagaagcaaggggctgaaaagatctgaaggtcccacctccatttgcaattgacctcttctgggaacttcctcagatggacaagattaccccaccttgccctttacgtatctgctcttaggtgcttcttcacttcagttgctttgcaggaagtgtctagaggaatatggtgggcacagaagtagctctggtgaccttgatcaaggtgttttgaaatgcagaattcttgagttctggaagggactttagagaataccagtgttattaatgacaaaggcactgaggcccagggaggtgacccgaattataaaggccagcgccagaacccagatttcctaactctggtgctctttccctttatcagtttgactgtggcctgttaactggtatatacatatatatgtcaggcaaagtgctgctggaagtagaatttgtccaataacaggtcaacttcagagactatctgatttcctaatgtcagagtagaagattttatgctgctgtttacaaaagcccaatgtaatgcataggaagtatggcatgaacatctttaggagactaatggaaatattattggtgtttacccagtattccatttttttcattgtgttctctattgctgctctctcactcccccatgaggtacagcagaaaggagaactatccaaaactaatttcctctgacatgtaagacgaatgatttaggtacgtcaaagcagtagtcaaggaggaaagggatagtccaaagacttaactggttcatattggactgataatctctttaaatggctttatgctagtttgacctcatttgtaaaatatttatgagaaagttctcatttaaaatgagatcgttgtttacagtgtatgtactaagcagtaagctatcttcaaatgtctaaggtagtaactttccatagggcctccttagatccctaagatggctttttctccttggtatttctgggtctttctgacatcagcagagaactggaaagacatagccaactgctgttcatgttactcatgactcctttctctaaaactgccttccacaattcactagaccagaagtggacgcaacttaagctgggataatcacattatcatctgaaaatctggagttgaacagcaaaagaagacaacatttctcaaatgcacatctcatggcagctaagccacatggctgggatttaaagcctttagagccagcccatggctttagctacctcactatgctgcttcacaaaccttgctcctgtgtaaaactatattctcagtgtagggcagagaggtctaacaccaacataaggtactagcagtgtttcccgtattgacaggaatacttaactcaataattcttttcttttccatttagtaacagttgtgatgactatgtttctattctaagtaattcctgtattctacagcagatactttgtcagcaatactaagggaagaaacaaagttgaaccgtttctttaataa

SEQ ID NO: 138 - protein, 288 aa, Homo sapiens
MGHTRRQGTSPSKCPYLNFFQLLVLAGLSHFCSGVIHVTKEVKEVATLSCGHNVSVEELAQTRIYWQKEKKMVLTMMSGDMNIWPEYKNRTIFDITNNLSIVILALRPSDEGTYECVVLKYEKDAFKREHLAEVTLSVKADFPTPSISDFEIPTSNIRRIICSTSGGFPEPHLSWLENGEELNAINTTVSQDPETELYAVSSKLDFNMTTNHSFMCLIKYGHLRVNQTFNWNTTKQEHFPDNLLPSWAITLISVNGIFVICCLTYCFAPRCRERRRNERLRRESVRPV

SEQ ID NO: 139 - DNA, 1701 bp, Mus musculus
gagttttatacctcaatagactcttactagtttctctttttcaggttgtgaaactcaaccttcaaagacactctgttccatttctgtggactaataggatcatctttagcatctgccgggtggatgccatccaggcttctttttctacatctctgtttctcgatttttgtgagcctaggaggtgcctaagctccattggctctagattcctggctttccccatcatgttctccaaagcatctgaagctatggcttgcaattgtcagttgatgcaggatacaccactcctcaagtttccatgtccaaggctcattcttctctttgtgctgctgattcgtctttcacaagtgtcttcagatgttgatgaacaactgtccaagtcagtgaaagataaggtattgctgccttgccgttacaactctcctcatgaagatgagtctgaagaccgaatctactggcaaaaacatgacaaagtggtgctgtctgtcattgctgggaaactaaaagtgtggcccgagtataagaaccggactttatatgacaacactacctactctcttatcatcctgggcctggtcctttcagaccggggcacatacagctgtgtcgttcaaaagaaggaaagaggaacgtatgaagttaaacacttggctttagtaaagttgtccatcaaagctgacttctctacccccaacataactgagtctggaaacccatctgcagacactaaaaggattacctgctttgcttccgggggtttcccaaagcctcgcttctcttggttggaaaatggaagagaattacctggcatcaatacgacaatttcccaggatcctgaatctgaattgtacaccattagtagccaactagatttcaatacgactcgcaaccacaccattaagtgtctcattaaatatggagatgctcacgtgtcagaggacttcacctgggaaaaacccccagaagaccctcctgatagcaagaacacacttgtgctctttggggcaggattcggcgcagtaataacagtcgtcgtcatcgttgtcatcatcaaatgcttctgtaagcacagaagctgtttcagaagaaatgaggcaagcagagaaacaaacaacagccttaccttcgggcctgaagaagcattagctgaacagaccgtcttcctttagttcttctctgtccatgtgggatacatggtattatgtggctcatgaggtacaatctttctttcagcaccgtgctagctgatctttcggacaacttgacacaagatagagttaactgggaagagaaagccttgaatgaggatttctttccatcaggaagcctacgggcaagtttgctgggcctttgattgcttgatgactgaagtggaaaggctgagcccactgtgggtggtgctagccctgggcaggggcaggtgaccctgggtggtataagaaaaagagctgtcactaaaaggagaggtgcctagtcttactgcaacttgatatgtcatgtttggttggtgtctgtgggaggcctgcccttttctgaagagaagtggtgggagagtggatggggtgggggcagaggaaaagtgggggagagggcctgggaggagaggagggagggggacggggtgggggtggggaaaactatggttgggatgtaaaaacgataataatataaatattaaataaaaagagagtattgagcaaa

SEQ ID NO: 140 - protein, 306 aa, Mus musculus
MACNCQLMQDTPLLKFPCPRLILLFVLLIRLSQVSSDVDEQLSKSVKDKVLLPCRYNSPHEDESEDRIYWQKHDKVVLSVIAGKLKVWPEYKNRTLYDNTTYSLIILGLVLSDRGTYSCVVQKKERGTYEVKHLALVKLSIKADFSTPNITESGNPSADTKRITCFASGGFPKPRFSWLENGRELPGINTTISQDPESELYTISSQLDFNTTRNHTIKCLIKYGDAHVSEDFTWEKPPEDPPDSKNTLVLFGAGFGAVITVVVIVVIIKCFCKHRSCFRRNEASRETNNSLTFGPEEALAEQTVFL

SEQ ID NO: 141 - DNA, 2720 bp, Homo sapiens
agtcattgccgaggaaggcttgcacagggtgaaagctttgcttctctgctgctgtaacagggactagcacagacacacggatgagtggggtcatttccagatattaggtcacagcagaagcagccaaaatggatccccagtgcactatgggactgagtaacattctctttgtgatggccttcctgctctctggtgctgctcctctgaagattcaagcttatttcaatgagactgcagacctgccatgccaatttgcaaactctcaaaaccaaagcctgagtgagctagtagtattttggcaggaccaggaaaacttggttctgaatgaggtatacttaggcaaagagaaatttgacagtgttcattccaagtatatgggccgcacaagttttgattcggacagttggaccctgagacttcacaatcttcagatcaaggacaagggcttgtatcaatgtatcatccatcacaaaaagcccacaggaatgattcgcatccaccagatgaattctgaactgtcagtgcttgctaacttcagtcaacctgaaatagtaccaatttctaatataacagaaaatgtgtacataaatttgacctgctcatctatacacggttacccagaacctaagaagatgagtgttttgctaagaaccaagaattcaactatcgagtatgatggtgttatgcagaaatctcaagataatgtcacagaactgtacgacgtttccatcagcttgtctgtttcattccctgatgttacgagcaatatgaccatcttctgtattctggaaactgacaagacgcggcttttatcttcacctttctctatagagcttgaggaccctcagcctcccccagaccacattccttggattacagctgtacttccaacagttattatatgtgtgatggttttctgtctaattctatggaaatggaagaagaagaagcggcctcgcaactcttataaatgtggaaccaacacaatggagagggaagagagtgaacagaccaagaaaagagaaaaaatccatatacctgaaagatctgatgaagcccagcgtgtttttaaaagttcgaagacatcttcatgcgacaaaagtgatacatgtttttaattaaagagtaaagcccatacaagtattcattttttctaccctttcctttgtaagttcctgggcaacctttttgatttcttccagaaggcaaaaagacattaccatgagtaataagggggctccaggactccctctaagtggaatagcctccctgtaactccagctctgctccgtatgccaagaggagactttaattctcttactgcttcttttcacttcagagcacacttatgggccaagcccagcttaatggctcatgacctggaaataaaatttaggaccaatacctcctccagatcagattcttctcttaatttcatagattgtgttttttttttaaatagacctctcaatttctggaaaactgccttttatctgcccagaattctaagctggtgccccactgaattttgtgtgtacctgtgactaaacaactacctcctcagtctgggtgggacttatgtatttatgaccttatagtgttaatatcttgaaacatagagatctatgtactgtaatagtgtgattactatgctctagagaaaagtctacccctgctaaggagttctcatccctctgtcagggtcagtaaggaaaacggtggcctagggtacaggcaacaatgagcagaccaacctaaatttggggaaattaggagaggcagagatagaacctggagccacttctatctgggctgttgctaatattgaggaggcttgccccacccaacaagccatagtggagagaactgaataaacaggaaaatgccagagcttgtgaaccctgtttctcttgaagaactgactagtgagatggcctggggaagctgtgaaagaaccaaaagagatcacaatactcaaaagagagagagagagaaaaaagagagatcttgatccacagaaatacatgaaatgtctggtctgtccaccccatcaacaagtcttgaaacaagcaacagatggatagtctgtccaaatggacataagacagacagcagtttccctggtggtcagggaggggttttggtgatacccaagttattgggatgtcatcttcctggaagcagagctggggagggagagccatcaccttgataatgggatgaatggaaggaggcttaggactttccactcctggctgagagaggaagagctgcaacggaattaggaagaccaagacacagatcacccggggcttacttagcctacagatgtcctacgggaacgtgggctggcccagcatagggctagcaaatttgagttggatgattgtttttgctcaaggcaaccagaggaaacttgcatacagagacagatatactgggagaaatgactttgaaaacctggctctaaggtgggatcactaagggatggggcagtctctgcccaaacataaagagaactctggggagcctgagccacaaaaatgttcctttattttatgtaaaccctcaagggttatagactgccatgctagacaagcttgtccatgtaatattcccatgtttttaccctgcccctgccttgattagactcctagcacctggctagtttctaacatgttttgtgcagcacagtttttaataaatgcttgttacattca

SEQ ID NO: 142 - protein, 329 aa, Homo sapiens
MDPQCTMGLSNILFVMAFLLSGAAPLKIQAYFNETADLPCQFANSQNQSLSELVVFWQDQENLVLNEVYLGKEKFDSVHSKYMGRTSFDSDSWTLRLHNLQIKDKGLYQCIIHHKKPTGMIRIHQMNSELSVLANFSQPEIVPISNITENVYINLTCSSIHGYPEPKKMSVLLRTKNSTIEYDGVMQKSQDNVTELYDVSISLSVSFPDVTSNMTIFCILETDKTRLLSSPFSIELEDPQPPPDHIPWITAVLPTVIICVMVFCLILWKWKKKKRPRNSYKCGTNTMEREESEQTKKREKIHIPERSDEAQRVFKSSKTSSCDKSDTCF

SEQ ID NO: 143 - DNA, 2539 bp, Mus musculus
attgctgaggaagaaagaggagcaagcagacgcgtaagagtggctcctgtaggcagcacggacttgaacaaccagactcctgtagacgtgttccagaacttacggaagcacccacgatggaccccagatgcaccatgggcttggcaatccttatctttgtgacagtcttgctgatctcagatgctgtttccgtggagacgcaagcttatttcaatgggactgcatatctgccgtgcccatttacaaaggctcaaaacataagcctgagtgagctggtagtattttggcaggaccagcaaaagttggttctgtacgagcactatttgggcacagagaaacttgatagtgtgaatgccaagtacctgggccgcacgagctttgacaggaacaactggactctacgacttcacaatgttcagatcaaggacatgggctcgtatgattgttttatacaaaaaaagccacccacaggatcaattatcctccaacagacattaacagaactgtcagtgatcgccaacttcagtgaacctgaaataaaactggctcagaatgtaacaggaaattctggcataaatttgacctgcacgtctaagcaaggtcacccgaaacctaagaagatgtattttctgataactaattcaactaatgagtatggtgataacatgcagatatcacaagataatgtcacagaactgttcagtatctccaacagcctctctctttcattcccggatggtgtgtggcatatgaccgttgtgtgtgttctggaaacggagtcaatgaagatttcctccaaacctctcaatttcactcaagagtttccatctcctcaaacgtattggaaggagattacagcttcagttactgtggccctcctccttgtgatgctgctcatcattgtatgtcacaagaagccgaatcagcctagcaggcccagcaacacagcctctaagttagagcgggatagtaacgctgacagagagactatcaacctgaaggaacttgaaccccaaattgcttcagcaaaaccaaatgcagagtgaaggcagtgagagcctgaggaaagagttaaaaattgctttgcctgaaataagaagtgcagagtttctcagaattcaaaaatgttctcagctgattggaattctacagttgaataattaaagaacaaaatacacaacagtgtccatattttatcctgtttcctttccaagtttttgggcaatgtcaattgtgtcccctatgccaggagcagacatctattttgtcttgctttgtttaactcagtgcacactcataggccaagagcactgaaatggcttctttcccaggaataacattttggatcaatctctcctacttgagatcagattcttcttctaattttgcatagtgtgtttttatatggaactccttgttgtaggaatactggcttttatctgtcttgcacacttgcatacttatatacttatacctggacagctacctcttcagtcaggatgggagtggtatatttggtgatgttatttgatgtgttcgtgttgctatcttaaaacagcaaagagcatatactatagtagctcaactacaatgatctagagaaagacccagcacttataagaaacactgtccctccatcagggtcaataatgaatacaatgacctaagtaatatacaggtgacagcaacagcacagagttctcagtgctggcaaatcaagaaacacaaatatggaaccatctctagatccaagagccactcctacctgggctgccacagatactggaagaatccacctgcctggccagcaagtcacaacttagcaggcagcactgaagaaagcaagatgtactgtatgcccttttaagaaaatgcctggaaaggtctggagaatgctgtgcaaggataagacagccaagcactcaaaaccaggagacatcactagaatccaaccaacaaatgtttatggaaggactgatctgcccagtccattgaaaagtcaagaggtcagagatagaccagtgtgtgtctcaatggatgtagatatcagccacctcggtgctcaacaggtattttatgatctccttgtttcaaattcatctagatgtagaactagggagagagcagtcacattgatgaaaggctaggactctttcagctcatggcttgtgtggaaggagggaaagcagaaatcacaacactctgagactactgtagtctgcagatacctgagtgggtgtggcttggcctttcaaaggacaaagagcaactaatgctgaaagcacatagtgtatctatacggcatggaatagtcatcacccagacttaaagagaactttggcaggtctgagcagcaaaatattgttgtttccattttacataaagggccctggagggctatagactattccgctggcagggctcatgcttgtaatgtgtccatcttgattcaccctgtgcagactcttaagatctggccagttaccaacatgttctgtacagagtggatttcaataaagttttcttgaattttttcaag

SEQ ID NO: 144 - protein, 309 aa, Mus musculus
MDPRCTMGLAILIFVTVLLISDAVSVETQAYFNGTAYLPCPFTKAQNISLSELVVFWQDQQKLVLYEHYLGTEKLDSVNAKYLGRTSFDRNNWTLRLHNVQIKDMGSYDCFIQKKPPTGSIILQQTLTELSVIANFSEPEIKLAQNVTGNSGINLTCTSKQGHPKPKKMYFLITNSTNEYGDNMQISQDNVTELFSISNSLSLSFPDGVWHMTVVCVLETESMKISSKPLNFTQEFPSPQTYWKEITASVTVALLLVMLLIIVCHKKPNQPSRPSNTASKLERDSNADRETINLKELEPQIASAKPNAE

SEQ ID NO: 145 - DNA, 1086 bp, Homo sapiens
gaacttagggctgcttgtggctgggcactcgcgcagaggccggcccgacgagccatggttgctgggagcgacgcggggcgggccctgggggtcctcagcgtggtctgcctgctgcactgctttggtttcatcagctgtttttcccaacaaatatatggtgttgtgtatgggaatgtaactttccatgtaccaagcaatgtgcctttaaaagaggtcctatggaaaaaacaaaaggataaagttgcagaactggaaaattctgaattcagagctttctcatcttttaaaaatagggtttatttagacactgtgtcaggtagcctcactatctacaacttaacatcatcagatgaagatgagtatgaaatggaatcgccaaatattactgataccatgaagttctttctttatgtgcttgagtctcttccatctcccacactaacttgtgcattgactaatggaagcattgaagtccaatgcatgataccagagcattacaacagccatcgaggacttataatgtactcatgggattgtcctatggagcaatgtaaacgtaactcaaccagtatatattttaagatggaaaatgatcttccacaaaaaatacagtgtactcttagcaatccattatttaatacaacatcatcaatcattttgacaacctgtatcccaagcagcggtcattcaagacacagatatgcacttatacccataccattagcagtaattacaacatgtattgtgctgtatatgaatggtattctgaaatgtgacagaaaaccagacagaaccaactccaattgattggtaacagaagatgaagacaacagcataactaaattattttaaaaactaaaaagccatctgatttctcatttgagtattacaatttttgaacaactgttggaaatgtaacttgaagcagctgctttaagaagaaatacccactaacaaagaacaagcattagttttggctgtcatcaacttattatatgactaggtgcttgctttttttgtcagtaaattgtttttactgatgatgtagatacttttgtaaataaatgtaaatatgtacacaagtga

SEQ ID NO: 146 - protein, 250 aa, Homo sapiens
MVAGSDAGRALGVLSVVCLLHCFGFISCFSQQIYGVVYGNVTFHVPSNVPLKEVLWKKQKDKVAELENSEFRAFSSFKNRVYLDTVSGSLTIYNLTSSDEDEYEMESPNITDTMKFFLYVLESLPSPTLTCALTNGSIEVQCMIPEHYNSHRGLIMYSWDCPMEQCKRNSTSIYFKMENDLPQKIQCTLSNPLFNTTSSIILTTCIPSSGHSRHRYALIPIPLAVITTCIVLYMNGILKCDRKPDRTNSN

SEQ ID NO: 147 - DNA, 3749 bp, Homo sapiens
agacagcctctgctgcatgacacgaagcttgcttctgcctggcatctgtgagcagctgccaggctccggccaggatcccttccttctcctcattggctgatggatcccaaggggctcctctccttgaccttcgtgctgtttctctccctggcttttggggcaagctacggaacaggtgggcgcatgatgaactgcccaaagattctccggcagttgggaagcaaagtgctgctgcccctgacatatgaaaggataaataagagcatgaacaaaagcatccacattgtcgtcacaatggcaaaatcactggagaacagtgtcgagaacaaaatagtgtctcttgatccatccgaagcaggccctccacgttatctaggagatcgctacaagttttatctggagaatctcaccctggggatacgggaaagcaggaaggaggatgagggatggtaccttatgaccctggagaaaaatgtttcagttcagcgcttttgcctgcagttgaggctttatgagcaggtctccactccagaaattaaagttttaaacaagacccaggagaacgggacctgcaccttgatactgggctgcacagtggagaagggggaccatgtggcttacagctggagtgaaaaggcgggcacccacccactgaacccagccaacagctcccacctcctgtccctcaccctcggcccccagcatgctgacaatatctacatctgcaccgtgagcaaccctatcagcaacaattcccagaccttcagcccgtggcccggatgcaggacagacccctcagaaacaaaaccatgggcagtgtatgctgggctgttagggggtgtcatcatgattctcatcatggtggtaatactacagttgagaagaagaggtaaaacgaaccattaccagacaacagtggaaaaaaaaagccttacgatctatgcccaagtccagaaaccaggtcctcttcagaagaaacttgactccttcccagctcaggacccttgcaccaccatatatgttgctgccacagagcctgtcccagagtctgtccaggaaacaaattccatcacagtctatgctagtgtgacacttccagagagctgacaccagagaccaacaaagggactttctgaaggaaaatggaaaaaccaaaatgaacactgaacttggccacaggccccaagtttcctctggcagacatgctgcacgtctgtacccttctcagatcaactccctggtgatgtttcttccacatacatctgtgaaatgaacaaggaagtgaggcttcccaagaatttagcttgctgtgcagtggctgcaggcgcagaacagagcgttacttgataacagcgttccatctttgtgttgtagcagatgaaatggacagtaatgtgagttcagactttgggcatcttgctcttggctggaactggataataaaaatcagactgaaagccaggacatctgagtacctatctcacacactggaccaccagtcacaaagtctggaaaagtttacattttggctatctttactttgttctgggagctgatcatgataacctgcagacctgatcaagcctctgtgcctcagtttctctctcaggataaagagtgaatagaggctgaagggtgaatttcttattatacataaaacactctgatattattgtataaaggaagctaagaatattattttatttgcaaaacccagaagctaaaaagtcaataaacagaaagaatgattttgagatctctgagttttgaacagtggactggaaaccatgtaagagccttaaaagtacagttctgtgcaaatggcattcagttttaaagaaaaacgtagcaaatgtttgatggtgctgttacaaaggagcttggaatactcagaggaacttgtcccatggtgatttttcacttctcaaaatgatgtttaaatcccagttctctgttgattcccttgaacaacaaacctggaacctcagctaagactctctgtgaccagattctgaacctcttatatccagggcttcaaggggtattgcaggtcaaggtctttcctaggcactttctactccctgcatacctctcctcacactaaatttatcctctagtagaaaattaagttattttggtctaacagcttcaaatctttgaatgctcaataacttattttgcaagctgcaggcagaaagagactttttaagtaaagtcctttgttttttcctattctctgcttttagacaggctgtcctcaatttaagccctgctttttcttattgtttcttatataaacttggtaagtactgtaagaaacagccactatcataccattgcataataaggagcaccaacttcccagctcaaaactcaggtccttattgccttgtatcttacctcctctatgaggtcaattcacattgtaagcctgttgcttagtgcatctcgtttcctggtaccagcttctttaatagagttcttagttgcaatcaacagaagctggctttggcttttttatgtagaaaaggaacctattgaaaagatactgattggttccaataactgctagaagtttctgcaaaaccatgctttgaaagtgagcaggaaaagaagagactaggctgtggctgggagcacagccaaaattacaaaaccagcccagggatgatgatcctgttcatgcacagccactgtccccagcactaggcacagactctaccactgcctcactgtctctgctggacttggaaacttgatattactgttactgctgcactgtctgccatgaaaatgaattctccagggtcccttcttcatcctttcatctctagcttataattcaaagtctgggattgagtggccaatcctaggtcacatgtccatgtcctatctccaaggggggctgggaattgaatatctggcattttccactttcacttcttatgaattaaggaattctacaaataatagaagtgggattcaggtggtaggcagacaaaaaagcctcacaattatccactacgccacccttgtataaccttaccctcattcactgtctactctcaaaactgtggagctactaatgaagatttgtaaacccgggcttatgagcacccattcctttactacaactcagattgctctagaagctcagttcccagcacttggatttttccagtagctgaattctacctgaaggaagggcagaaacaaagggtgaagaagaggctatcacttccaagtatcctgcacccctgggctcaagacctcactggggagggagtcttttgggccacccaccaaacagcactggcattatgcctctcaccctagaccatggttacacgtggtaaaacaaccccttctggtgatacattcacaactctctagtttcccccaaatggcactatggggagcgggagcttgccttttcctcagacttaaaacaataagttttccccgtgtttcccctctaatgctgttttcttttgaccaagcatgtctgaattctagagaagtcaggaggaacacacccattctcggtttgaagggactgatgttctgaagtacaactgggcacagtcccaggctcttcaggacgcttcctccattcacacagcggggatgtgattgttacagcgggtggtgtgtgctggctgagaagccactgtgaattgattcttcttctgaagtttatgtttctactttttggaaatgaataaattacagccagtccatcaaggaaa

SEQ ID NO: 148 - protein, 335 aa, Homo sapiens
MDPKGLLSLTFVLFLSLAFGASYGTGGRMMNCPKILRQLGSKVLLPLTYERINKSMNKSIHIVVTMAKSLENSVENKIVSLDPSEAGPPRYLGDRYKFYLENLTLGIRESRKEDEGWYLMTLEKNVSVQRFCLQLRLYEQVSTPEIKVLNKTQENGTCTLILGCTVEKGDHVAYSWSEKAGTHPLNPANSSHLLSLTLGPQHADNIYICTVSNPISNNSQTFSPWPGCRTDPSETKPWAVYAGLLGGVIMILIMVVILQLRRRGKTNHYQTTVEKKSLTIYAQVQKPGPLQKKLDSFPAQDPCTTIYVAATEPVPESVQETNSITVYASVTLPES

SEQ ID NO: 149 - DNA, 2688 bp, Mus musculus
gagcttcttccttgggggtaacagtaagcagctgtcctgccgagctgagctgagctgagctcacagctggggaccctgtctgcgattgctggctaatggatcccaaaggatccctttcctggagaatacttctgtttctctccctggcttttgagttgagctacggaacaggtggaggtgtgatggattgcccagtgattctccagaagctgggacaggacacgtggctgcccctgacgaatgaacatcagataaataagagcgtgaacaaaagtgtccgcatcctcgtcaccatggcgacgtccccaggaagcaaatccaacaagaaaattgtgtcttttgatctctctaaagggagctatccagatcacctggaggatggctaccactttcaatcaaaaaacctgagcctgaagatcctcgggaacaggcgggagagtgaaggatggtacttggtgagcgtggaggagaacgtttctgttcagcaattctgcaagcagctgaagctttatgaacaggtctcccctccagagattaaagtgctaaacaaaacccaggagaacgagaatgggacctgcagcttgctgttggcctgcacagtgaagaaaggggaccatgtgacttacagctggagtgatgaggcaggcacccacctgctgagccgagccaaccgctcccacctcctgcacatcactcttagcaaccagcatcaagacagcatctacaactgcaccgcaagcaaccctgtcagcagtatctctaggaccttcaacctatcatcgcaagcatgcaagcaggaatcctcctcagaatcgagtccatggatgcaatatactcttgtaccactgggggtcgttataatcttcatcctggttttcacggcaataataatgatgaaaagacaaggtaaatcaaatcactgccagccaccagtggaagaaaaaagccttactatttatgcccaagtacagaaatcagggcctcaagagaagaaacttcatgatgccctaacagatcaggacccctgcacaaccatttatgtggctgccacagagcctgccccagagtctgtccaggaaccaaaccccaccacagtttatgccagtgtgacactgccagagagctgacccatatacccagtgaaaggactttttgaaggaggatagaagaaccaaaatccacactgaactggaccccgggtcccaagttctctgtgacagaaactgcacatctgtaaccttctccaatcagttccctggtgacggatctgcacaggcgtgcttatgaagtagatgagaagtgaggcttcctgggcatgcaacctgctctgctgctgacacagatatgaagcagagatcccgtggtacagtgtaccatctttgctgtagcagataatgtgggtttaggcatctcactctttgctggactggataacagaactcaaaaaaaaaccaacaagccaaagacatagactccatctcagatggctgagcacaaagtataaaagccattttggctctctggactttattctggaagctgatcctgatcacctcaaggccaagggctccatgcctcagtttctctctcaccctctagatgaagagggaacaaagcataaagagtgaaatccttgttgtctgagatcattctataaacgaactgacattttatttgcaaaactcaagctagtaattcagtagacttgaagatgattttagagcctcttatgcttcaaacaacagaatgaaatccatccaatgttcttcaaagtgtggttctctgattaagtcaaagcaacactgtttggcaatgctgctgtaaagttgcctggaatactcagaggaacttgtcccagggaggtttttttcacttcttcaaagaacttttgaatttaagttctctgtttattcccttgagcaaaactctggaacctcaagagtctctctccgttggttctgaggccattttatagcctaggcctcctgtggatctacatgtgtatcacccacttcctatctcactgcatacctctgtgtagtagtaaatttaacctcaagtagaaaattaaattattttggatgatcagttccaaatgattagatgtttagtctcttataataggatgtaggtagagtctatataaagtcctatattcttcacgttgtctgtcctcagagagaccatctttcaacctatcttccttcttgcacaactttggcaaatactttaaaaataaccattgtggagatggggagaggtctaaatggataatagtacttgctttgcaaacatgaagatctgggttcaaactcccagtgtccatgtaaaaagataagtgtggttgagtgtgccagtaacatagacacagataggtcctgagactttgctccctagccttcccagccaggcataaatgtcaagtcccctgagagtgacagaggaagatactccccccacacacacacacatacacgcacagtgatacacatatacatgcatacaaaaaaaaaacttattgtaacaaagaacaccaactgcctggctcaaaactctcatgtcccattactctgtacctttctgtatttagataatttacagtgtgagttctgctgttccatgtatcctatttgtgttactaacttatgtcaaagtatttctaattataatcaacaaaagctaactttg

SEQ ID NO: 150 - protein, 343 aa, Mus musculus
MDPKGSLSWRILLFLSLAFELSYGTGGGVMDCPVILQKLGQDTWLPLTNEHQINKSVNKSVRILVTMATSPGSKSNKKIVSFDLSKGSYPDHLEDGYHFQSKNLSLKILGNRRESEGWYLVSVEENVSVQQFCKQLKLYEQVSPPEIKVLNKTQENENGTCSLLLACTVKKGDHVTYSWSDEAGTHLLSRANRSHLLHITLSNQHQDSIYNCTASNPVSSISRTFNLSSQACKQESSSESSPWMQYTLVPLGVVIIFILVFTAIIMMKRQGKSNHCQPPVEEKSLTIYAQVQKSGPQEKKLHDALTDQDPCTTIYVAATEPAPESVQEPNPTTVYASVTLPES

SEQ ID NO: 151 - DNA, 1682 bp, Homo sapiens
agtggtcctgccgcctggtctcacctcgctatggttcgtctgcctctgcagtgcgtcctctggggctgcttgctgaccgctgtccatccagaaccacccactgcatgcagagaaaaacagtacctaataaacagtcagtgctgttctttgtgccagccaggacagaaactggtgagtgactgcacagagttcactgaaacggaatgccttccttgcggtgaaagcgaattcctagacacctggaacagagagacacactgccaccagcacaaatactgcgaccccaacctagggcttcgggtccagcagaagggcacctcagaaacagacaccatctgcacctgtgaagaaggctggcactgtacgagtgaggcctgtgagagctgtgtcctgcaccgctcatgctcgcccggctttggggtcaagcagattgctacaggggtttctgataccatctgcgagccctgcccagtcggcttcttctccaatgtgtcatctgctttcgaaaaatgtcacccttggacaagctgtgagaccaaagacctggttgtgcaacaggcaggcacaaacaagactgatgttgtctgtggtccccaggatcggctgagagccctggtggtgatccccatcatcttcgggatcctgtttgccatcctcttggtgctggtctttatcaaaaaggtggccaagaagccaaccaataaggccccccaccccaagcaggaaccccaggagatcaattttcccgacgatcttcctggctccaacactgctgctccagtgcaggagactttacatggatgccaaccggtcacccaggaggatggcaaagagagtcgcatctcagtgcaggagagacagtgaggctgcacccacccaggagtgtggccacgtgggcaaacaggcagttggccagagagcctggtgctgctgctgctgtggcgtgagggtgaggggctggcactgactgggcatagctccccgcttctgcctgcacccctgcagtttgagacaggagacctggcactggatgcagaaacagttcaccttgaagaacctctcacttcaccctggagcccatccagtctcccaacttgtattaaagacagaggcagaagtttggtggtggtggtgttggggtatggtttagtaatatccaccagaccttccgatccagcagtttggtgcccagagaggcatcatggtggcttccctgcgcccaggaagccatatacacagatgcccattgcagcattgtttgtgatagtgaacaactggaagctgcttaactgtccatcagcaggagactggctaaataaaattagaatatatttatacaacagaatctcaaaaacactgttgagtaaggaaaaaaaggcatgctgctgaatgatgggtatggaactttttaaaaaagtacatgcttttatgtatgtatattgcctatggatatatgtataaatacaatatgcatcatatattgatataacaagggttctggaagggtacacagaaaacccacagctcgaagagtggtgacgtctggggtggggaagaagggtctgggggagggttggttaaagggagatttggctttcccataatgcttcatcatttttcccaaaaggagagtgaattcacataatgcttatgtaattaaaaaatcatcaaacatgtaaaaa

SEQ ID NO: 152 - protein, 277 aa, Homo sapiens
MVRLPLQCVLWGCLLTAVHPEPPTACREKQYLINSQCCSLCQPGQKLVSDCTEFTETECLPCGESEFLDTWNRETHCHQHKYCDPNLGLRVQQKGTSETDTICTCEEGWHCTSEACESCVLHRSCSPGFGVKQIATGVSDTICEPCPVGFFSNVSSAFEKCHPWTSCETKDLVVQQAGTNKTDVVCGPQDRLRALVVIPIIFGILFAILLVLVFIKKVAKKPTNKAPHPKQEPQEINFPDDLPGSNTAAPVQETLHGCQPVTQEDGKESRISVQERQ

SEQ ID NO: 153 - DNA, 1621 bp, Mus musculus
agcagggactttggagtgacttgtggcttcagcaggagccctgtgatttggctcttctgatctcgccctgcgatggtgtctttgcctcggctgtgcgcgctatggggctgcttgttgacagcggtccatctagggcagtgtgttacgtgcagtgacaaacagtacctccacgatggccagtgctgtgatttgtgccagccaggaagccgactgacaagccactgcacagctcttgagaagacccaatgccacccatgtgactcaggcgaattctcagcccagtggaacagggagattcgctgtcaccagcacagacactgtgaacccaatcaagggcttcgggttaagaaggagggcaccgcagaatcagacactgtctgtacctgtaaggaaggacaacactgcaccagcaaggattgcgaggcatgtgctcagcacacgccctgtatccctggctttggagttatggagatggccactgagaccactgataccgtctgtcatccctgcccagtcggcttcttctccaatcagtcatcacttttcgaaaagtgttatccctggacaaggtttaaagtcccggatgcgagccctgctggtcattcctgtcgtgatgggcatcctcatcaccattttcggggtgtttctctatatcaaaaaggtggtcaagaaaccaaaggataatgagatcttaccccctgcggctcgacggcaagatccccaggagatggaagattatcccggtcataacaccgctgctccagtgcaggagacgctgcacgggtgtcagcctgtcacacaggaggatggtaaagagagtcgcatctcagtgcaggagcggcaggtgacagacagcatagccttgaggcccctggtctgaaccctggaactgctttggaggcgatggctcggctcgggagcaggggcctggctctgaggactgcttgctgacctttgaagtttgagatgagccaagacagagcccagtgcagctaactctcatgcctgccccctatcatttctcaacttgctttttaaggatggagggagagctcgggcatcgggggtccacagtgatacctaccaagtgcagcagtgcaggacccagagtcgtcttgctgcggcgttcactgtaaggagtcatggacacaggagtccgtggcccacagcttgtgctgctagagggcacctggttgcccatcagcagggtactggctaaataaatctgtaattatttatacaatgacatctcagaaactctagcaggtggggcagaaaacaggtagtagaatgatgggtagagaaatagcttttaaaacacattccaaggcaggtaagatggcttttgtgagtaaaggagcttgctgcccaaacccggttacctgattttgatccctgggacttcatggtaaaagggagagaaccaaatccagagggttgtcatttgacctccatgtgtgctctgtggtaatgtaccccgtgtgtgcacatgtgcacatatcctaaaatggatgtggtggtgtattgtagaaattatttaatcccgccctggggtttctacctgtgtgttaccatttagttcttgaataaaagacacactcaacctttatatttacaataa

SEQ ID NO: 154 - protein, 203 aa, Mus musculus
MVSLPRLCALWGCLLTAVHLGQCVTCSDKQYLHDGQCCDLCQPGSRLTSHCTALEKTQCHPCDSGEFSAQWNREIRCHQHRHCEPNQGLRVKKEGTAESDTVCTCKEGQHCTSKDCEACAQHTPCIPGFGVMEMATETTDTVCHPCPVGFFSNQSSLFEKCYPWTRFKVPDASPAGHSCRDGHPHHHFRGVSLYQKGGQETKG

SEQ ID NO: 155 - DNA, 4721 bp, Homo sapiens
acacttcgggttcctcggggaggaggggctggaaccctagcccatcgtcaggacaaagatgctcaggctgctcttggctctcaacttattcccttcaattcaagtaacaggaaacaagattttggtgaagcagtcgcccatgcttgtagcgtacgacaatgcggtcaaccttagctgcaagtattcctacaatctcttctcaagggagttccgggcatcccttcacaaaggactggatagtgctgtggaagtctgtgttgtatatgggaattactcccagcagcttcaggtttactcaaaaacggggttcaactgtgatgggaaattgggcaatgaatcagtgacattctacctccagaatttgtatgttaaccaaacagatatttacttctgcaaaattgaagttatgtatcctcctccttacctagacaatgagaagagcaatggaaccattatccatgtgaaagggaaacacctttgtccaagtcccctatttcccggaccttctaagcccttttgggtgctggtggtggttggtggagtcctggcttgctatagcttgctagtaacagtggcctttattattttctgggtgaggagtaagaggagcaggctcctgcacagtgactacatgaacatgactccccgccgccccgggcccacccgcaagcattaccagccctatgccccaccacgcgacttcgcagcctatcgctcctgacacggacgcctatccagaagccagccggctggcagcccccatctgctcaatatcactgctctggataggaaatgaccgccatctccagccggccacctcaggcccctgttgggccaccaatgccaatttttctcgagtgactagaccaaatatcaagatcattttgagactctgaaatgaagtaaaagagatttcctgtgacaggccaagtcttacagtgccatggcccacattccaacttaccatgtacttagtgacttgactgagaagttagggtagaaaacaaaaagggagtggattctgggagcctcttccctttctcactcacctgcacatctcagtcaagcaaagtgtggtatccacagacattttagttgcagaagaaaggctaggaaatcattccttttggttaaatgggtgtttaatcttttggttagtgggttaaacggggtaagttagagtagggggagggataggaagacatatttaaaaaccattaaaacactgtctcccactcatgaaatgagccacgtagttcctatttaatgctgttttcctttagtttagaaatacatagacattgtcttttatgaattctgatcatatttagtcattttgaccaaatgagggatttggtcaaatgagggattccctcaaagcaatatcaggtaaaccaagttgctttcctcactccctgtcatgagacttcagtgttaatgttcacaatatactttcgaaagaataaaatagttctcctacatgaagaaagaatatgtcaggaaataaggtcactttatgtcaaaattatttgagtactatgggacctggcgcagtggctcatgcttgtaatcccagcactttgggaggccgaggtgggcagatcacttgagatcaggaccagcctggtcaagatggtgaaactccgtctgtactaaaaatacaaaatttagcttggcctggtggcaggcacctgtaatcccagctgcccaagaggctgaggcatgagaatcgcttgaacctggcaggcggaggttgcagtgagccgagatagtgccacagctctccagcctgggcgacagagtgagactccatctcaaacaacaacaacaacaacaacaacaacaacaaaccacaaaattatttgagtactgtgaaggattatttgtctaacagttcattccaatcagaccaggtaggagctttcctgtttcatatgtttcagggttgcacagttggtctctttaatgtcggtgtggagatccaaagtgggttgtggaaagagcgtccataggagaagtgagaatactgtgaaaaagggatgttagcattcattagagtatgaggatgagtcccaagaaggttctttggaaggaggacgaatagaatggagtaatgaaattcttgccatgtgctgaggagatagccagcattaggtgacaatcttccagaagtggtcaggcagaaggtgccctggtgagagctcctttacagggactttatgtggtttagggctcagagctccaaaactctgggctcagctgctcctgtaccttggaggtccattcacatgggaaagtattttggaatgtgtcttttgaagagagcatcagagttcttaagggactgggtaaggcctgaccctgaaatgaccatggatatttttctacctacagtttgagtcaactagaatatgcctggggaccttgaagaatggcccttcagtggccctcaccatttgttcatgcttcagttaattcaggtgttgaaggagcttaggttttagaggcacgtagacttggttcaagtctcgttagtagttgaatagcctcaggcaagtcactgcccacctaagatgatggttcttcaactataaaatggagataatggttacaaatgtctcttcctatagtataatctccataagggcatggcccaagtctgtctttgactctgcctatccctgacatttagtagcatgcccgacatacaatgttagctattggtattattgccatatagataaattatgtataaaaattaaactgggcaatagcctaagaaggggggaatattgtaacacaaatttaaacccactacgcagggatgaggtgctataatatgaggaccttttaacttccatcattttcctgtttcttgaaatagtttatcttgtaatgaaatataaggcacctcccacttttatgtatagaaagaggtcttttaatttttttttaatgtgagaaggaagggaggagtaggaatcttgagattccagatcgaaaatactgtactttggttgatttttaagtgggcttccattccatggatttaatcagtcccaagaagatcaaactcagcagtacttgggtgctgaagaactgttggatttaccctggcacgtgtgccacttgccagcttcttgggcacacagagttcttcaatccaagttatcagattgtatttgaaaatgacagagctggagagttttttgaaatggcagtggcaaataaataaatacttttttttaaatggaaagacttgatctatggtaataaatgattttgttttctgactggaaaaataggcctactaaagatgaatcacacttgagatgtttcttactcactctgcacagaaacaaagaagaaatgttatacagggaagtccgttttcactattagtatgaaccaagaaatggttcaaaaacagtggtaggagcaatgctttcatagtttcagatatggtagttatgaagaaaacaatgtcatttgctgctattattgtaagagtcttataattaatggtactcctataatttttgattgtgagctcacctatttgggttaagcatgccaatttaaagagaccaagtgtatgtacattatgttctacatattcagtgataaaattactaaactactatatgtctgctttaaatttgtactttaatattgtcttttggtattaagaaagatatgctttcagaatagatatgcttcgctttggcaaggaatttggatagaacttgctatttaaaagaggtgtggggtaaatccttgtataaatctccagtttagccttttttgaaaaagctagactttcaaatactaatttcacttcaagcagggtacgtttctggtttgtttgcttgacttcagtcacaatttcttatcagaccaatggctgacctctttgagatgtcaggctaggcttacctatgtgttctgtgtcatgtgaatgctgagaagtttgacagagatccaacttcagccttgaccccatcagtccctcgggttaactaactgagccaccggtcctcatggctattttaatgagggtattgatggttaaatgcatgtctgatcccttatcccagccatttgcactgccagctgggaactataccagacctggatactgatcccaaagtgttaaattcaactacatgctggagattagagatggtgccaataaaggacccagaaccaggatcttgattgctatagacttattaataatccaggtcaaagagagtgacacacactctctcaagacctggggtgagggagtctgtgttatctgcaaggccatttgaggctcagaaagtctctctttcctatagatatatgcatactttctgacatataggaatgtatcaggaatactcaaccatcacaggcatgttcctacctcagggcctttacatgtcctgtttactctgtctagaatgtccttctgtagatgacctggcttgcctcgtcacccttcaggtccttgctcaagtgtcatcttctcccctagttaaactaccccacaccctgtctgctttccttgcttatttttctccatagcattttaccatctcttacattagacatttttcttatttatttgtagtttataagcttcatgaggcaagtaactttgctttgtttcttgctgtatctccagtgcccagagcagtgcctggtatataataaatatttattgactgagtgaa

SEQ ID NO: 156 - protein, 220 aa, Homo sapiens
MLRLLLALNLFPSIQVTGNKILVKQSPMLVAYDNAVNLSCKYSYNLFSREFRASLHKGLDSAVEVCVVYGNYSQQLQVYSKTGFNCDGKLGNESVTFYLQNLYVNQTDIYFCKIEVMYPPPYLDNEKSNGTIIHVKGKHLCPSPLFPGPSKPFWVLVVVGGVLACYSLLVTVAFIIFWVRSKRSRLLHSDYMNMTPRRPGPTRKHYQPYAPPRDFAAYRS

SEQ ID NO: 157 - DNA, 4317 bp, Mus musculus
agaccttggcagatgtgacttcagttcacaccacactctgccttgctcacagaggaggggctgcagccctggccctcatcagaacaatgacactcaggctgctgttcttggctctcaacttcttctcagttcaagtaacagaaaacaagattttggtaaagcagtcgcccctgcttgtggtagatagcaacgaggtcagcctcagctgcaggtattcctacaaccttctcgcaaaggaattccgggcatccctgtacaagggcgtgaacagcgacgtggaagtctgtgtcgggaatgggaattttacctatcagccccagtttcgctcgaatgccgagttcaactgcgacggggatttcgacaacgaaacagtgacgttccgtctctggaatctgcacgtcaatcacacagatatttacttctgcaaaattgagttcatgtaccctccgccttacctagacaacgagaggagcaatggaactattattcacataaaagagaaacatctttgtcatactcagtcatctcctaagctgttttgggcactggtcgtggttgctggagtcctgttttgttatggcttgctagtgacagtggctctttgtgttatctggacaaatagtagaaggaacagactccttcaaagtgactacatgaacatgactccccggaggcctgggctcactcgaaagccttaccagccctacgcccctgccagagactttgcagcgtaccgcccctgacagggacccctatccagaagcccgccggctggtacccgtctacctgctcatcatcactgctctggataggaaaggacagcctcatcttcagccggccactttggacctctactgggccaccaatgccaactattttagagtgtctagatctaacatcatgatcatcttgagactctggaatgaatgacagaagcttctatggcaggataaagtctgtgtggcttgacccaaactcaagcttaatacatttattgacttgattggggaagttagagtagagcaatcaaaaagatcattcattcagccttgggaagtcaatttgcaggctcctggatgagccctgccccgttttcacttgccagcacatttcagtcatgtggtgtgatagccaaagatgttttggacagagaagaaaggatagaaaaaccttctctttggctaagttggtgtttggggtggggataggttagagtatagtacttaactatttgaaaaataatgaaaacacttttttcactcatgaaatgagccacttagctcctaaatagtgttttcctgttagtttagaaagttgtggacatatttttttaatgatttctgaccatttttaatcacattgactcatggaatggcctcaaagcaccccccagtgcttctttcctcattcccggtcatgggaactcagtattattaatagtcacaacatgatttcagaactagatagccctcccacaccaagaagaatgtgagaggaagtaaggtcactttatgtaaaaaaaaaaaaaaacaaacgcgtacacatatgtatgtatacatacatacctatgtgcacacacacacacatatacatacacacaaaatgctatgaagagttatctgtttagtagcctgttatagtcaaatcattttaagtttcaacttcttacagttgggccacttgttgtcctttgtggatggatatctgaaattgtgtctatatattgctagtcatgatactgtgaacaaaaagggtagtgttagtatttgtcagggtggtaaggatgcattccaggaagcttcctctgaggaagggaatgaggtcattcttgccatgtatgaaagacatagatgttttccagaaggcaccattgggagccccagtataagttcctttagactctacagtttagagggattttatatgtcctaggactcaggactccagaactttgtgggctcagctgcttcataccatggggatacattgacatgaacaattattttggaatgtgtctttagggacgacatcaaagttctcaagtacctacaagacctgatactggaatgaaggtggactttcttttttgcttccagttcggatcaactggaatgtatctggggaccttgaagaacggctgtccagctgtcttcaccatttgtatagtgctttgaattattcagaggttttaaagtcaggaagacctggtttaaaaaacatttcattatgagttaaatggcctcaggcaagtcactgttcatccaagtctatgactcctcaactgtaagatggccacactgaaacttgctaagatcctctggcctctgcctcccaagagttgggatttcaggagtgcacaatcatgacccaaactcgtgataatctctcagcttcaataactttccagctaattggaatatcctgtaatcaaacatgaggcatttcccctccccccactgtttttgtgtataaagagatctttaaactttttttttaatatgaggggtaagaaaagataggaatcttttaattctagacagaagatattgtgctttggttttttttttttttaatggcttctattctgtgcttttaattaaaccagagaaggccaagattagccctacttgtgtgataaaagaatgctggcccttgtgattgcagtcagcctcttgacacatagagttcttgaatctaagttataaaattatatttgaaaatgacagagctggagaatttatagaaagggtcatagcaaataacaaaccatttttttttaaacggaaagatttggtctttggcaatcaataactttgttttctaactggaaaaggaggtttactggagatgaatcacacctgaaagttttcatacctcctctgaacacaaccgaaacataggtgtccaaagcctttcgctctcggtatgaaccaacaggcgggttaaaaacactgggtcagagtaaagcttttgcagtttcagatgtagtgtgtatgaagaaaactatgtcacttgctgctattattgtaagagtctaagaactaaaggtgtgcctgtaatttctaattatgagctcacctatttggtaccgagcatgccaattttaaagagacccggtgtaccttatagctacatccaatgataaaattaccacactagcacatgcctgtgtttaaactcgtgctttaatgtttttcttagggcaggtatgcaccccctttgcagtgagttgggagagattttgaaaaagtgtatgacaaacatttttaacacctttggtttcctctctctgtgtctctttgtctctgtctctctctttctctcctgtgcatatgtctcccctccctcacttctctgtctcttcctctctccctctctctgtctttctctgtgtgtctctctgtctctgtgtatctctctgtctgtctctttctctgcagattttcaaaacgttgtttttctatggaagaaatacaagctgtggttggtttgctacgagtcagtagcagtttatcagtaggccaatgttttatctcttggagatttcagtctgggtttacccaatgtattctctgtaatgtgactgctggggacagatataacttgattgagccttcaaatcatttaggtcttcaatcatttagtcaacggagtgagccactaatctgcaatggctattttaatatgcatactgatggtcaaatggatgtctgatctctcatcccagctttctgtactaccatatgggaactatatgtaacttgtatacttacctgaatatgttaaattcaactacatggtaagatggaccagaaattgcaatgttcatgtccatatagccaccattaacccaagttaagcacagtagtgtgggttctctcaggacttgtgaatgagtttatgctctctacaaagacaggtgaagcttaaatctctcttgcactgctatgtttatgcaaatatcaagattgtttctgtaccagggacttaacacattctattcatactattttccctgtctacaatgttatttcatagatatctacttggtttgctcttacttccttgacatatttgcccaaatgccaccttcaactgtagttaattacctgtacaacctgtctccatgccttgttttattttctctataactctactaataggtatttttcttatttattggtttattgcctgttttttttcctaaatctacaccggatctccaaagggaaagaactccatttgctttgattttattgctgtatccccagtgcctagaataatgcttagcctgcaataaatatttattcattgact

SEQ ID NO: 158 - protein, 218 aa, Mus musculus
MTLRLLFLALNFFSVQVTENKILVKQSPLLVVDSNEVSLSCRYSYNLLAKEFRASLYKGVNSDVEVCVGNGNFTYQPQFRSNAEFNCDGDFDNETVTFRLWNLHVNHTDIYFCKIEFMYPPPYLDNERSNGTIIHIKEKHLCHTQSSPKLFWALVVVAGVLFCYGLLVTVALCVIWTNSRRNRLLQSDYMNMTPRRPGLTRKPYQPYAPARDFAAYRP

SEQ ID NO: 159 - DNA, 1282 bp, Homo sapiens
ggaagtctgtcaactgggagggggagaggggggtgatgggccaggaatggggtccccgggcatggtgctgggcctcctggtgcagatctgggccctgcaagaagcctcaagcctgagcgtgcagcaggggcccaacttgctgcaggtgaggcagggcagtcaggcgaccctggtctgccaggtggaccaggccacagcctgggaacggctccgtgttaagtggacaaaggatggggccatcctgtgtcaaccgtacatcaccaacggcagcctcagcctgggggtctgcgggccccagggacggctctcctggcaggcacccagccatctcaccctgcagctggaccctgtgagcctcaaccacagcggggcgtacgtgtgctgggcggccgtagagattcctgagttggaggaggctgagggcaacataacaaggctctttgtggacccagatgaccccacacagaacagaaaccggatcgcaagcttcccaggattcctcttcgtgctgctgggggtgggaagcatgggtgtggctgcgatcgtgtggggtgcctggttctggggccgccgcagctgccagcaaagggactcaggtaacagcccaggaaatgcattctacagcaacgtcctataccggccccggggggccccaaagaagagtgaggactgctctggagaggggaaggaccagaggggccagagcatttattcaacctccttcccgcaaccggccccccgccagccgcacctggcgtcaagaccctgccccagcccgagaccctgccccagccccaggcccggccaccccgtctctatggtcagggtctctcctagaccaagccccacccagcagccgaggccaaaagggttccccaaagtgggagaggagtgagagatcccaggagacctcaacaggaccccacccataggtacacacaaaaaaggggggatcgaggccagacacggtggctcacgcctgtaatcccagcagtttgggaagccgaggcgggtggaacacttgaggtcaggggtttgagaccagcctggcttgaacctgggaggcggaggttgcagtgagccgagattgcgccactgcactccagcctgggcgacagagtgagactccgtctcaaaaaaaacaaaaagcaggaggattgggagcctgtcagccccatcctgagaccccgtcctcatttctgtaatgatggatctcgctcccactttcccccaagaacctaataaaggcttgtgaagaaaaagcaaaaaaaaaaaaaaaaaa

SEQ ID NO: 160 - protein, 282 aa, Homo sapiens
MGSPGMVLGLLVQIWALQEASSLSVQQGPNLLQVRQGSQATLVCQVDQATAWERLRVKWTKDGAILCQPYITNGSLSLGVCGPQGRLSWQAPSHLTLQLDPVSLNHSGAYVCWAAVEIPELEEAEGNITRLFVDPDDPTQNRNRIASFPGFLFVLLGVGSMGVAAIVWGAWFWGRRSCQQRDSGNSPGNAFYSNVLYRPRGAPKKSEDCSGEGKDQRGQSIYSTSFPQPAPRQPHLASRPCPSPRPCPSPRPGHPVSMVRVSPRPSPTQQPRPKGFPKVGEE

SEQ ID NO: 161 - DNA, 1643 bp, Homo sapiens
agtctcacttcagttccttttgcatgaagagctcagaatcaaaagaggaaaccaacccctaagatgagctttccatgtaaatttgtagccagcttccttctgattttcaatgtttcttccaaaggtgcagtctccaaagagattacgaatgccttggaaacctggggtgccttgggtcaggacatcaacttggacattcctagttttcaaatgagtgatgatattgacgatataaaatgggaaaaaacttcagacaagaaaaagattgcacaattcagaaaagagaaagagactttcaaggaaaaagatacatataagctatttaaaaatggaactctgaaaattaagcatctgaagaccgatgatcaggatatctacaaggtatcaatatatgatacaaaaggaaaaaatgtgttggaaaaaatatttgatttgaagattcaagagagggtctcaaaaccaaagatctcctggacttgtatcaacacaaccctgacctgtgaggtaatgaatggaactgaccccgaattaaacctgtatcaagatgggaaacatctaaaactttctcagagggtcatcacacacaagtggaccaccagcctgagtgcaaaattcaagtgcacagcagggaacaaagtcagcaaggaatccagtgtcgagcctgtcagctgtccaggaggcagcatccttggccagagtaatgggctctctgcctggacccctcccagccatcccacttctcttccttttgcagagaaaggtctggacatctatctcatcattggcatatgtggaggaggcagcctcttgatggtctttgtggcactgctcgttttctatatcaccaaaaggaaaaaacagaggagtcggagaaatgatgaggagctggagacaagagcccacagagtagctactgaagaaaggggccggaagccccaccaaattccagcttcaacccctcagaatccagcaacttcccaacatcctcctccaccacctggtcatcgttcccaggcacctagtcatcgtcccccgcctcctggacaccgtgttcagcaccagcctcagaagaggcctcctgctccgtcgggcacacaagttcaccagcagaaaggcccgcccctccccagacctcgagttcagccaaaacctccccatggggcagcagaaaactcattgtccccttcctctaattaaaaaagatagaaactgtctttttcaataaaaagcactgtggatttctgccctcctgatgtgcatatccgtacttccatgaggtgttttctgtgtgcagaacattgtcacctcctgaggctgtgggccacagccacctctgcatcttcgaactcagccatgtggtcaacatctggagtttttggtctcctcagagagctccatcacaccagtaaggagaagcaatataagtgtgattgcaagaatggtagaggaccgagcacagaaatcttagagatttcttgtcccctctcaggtcatgtgtagatgcgataaatcaagtgattggtgtgcctgggtctcactacaagcagcctatctgcttaagagactctggagtttcttatgtgccctggtggacacttgcccaccatcctgtgagtaaaagtgaaataaaagctttgactaga

SEQ ID NO: 162 - protein, 377 aa, Homo sapiens
MSFPCKFVASFLLIFNVSSKGAVSKEITNALETWGALGQDINLDIPSFQMSDDIDDIKWEKTSDKKKIAQFRKEKETFKEKDTYKLFKNGTLKIKHLKTDDQDIYKVSIYDTKGKNVLEKIFDLKIQERVSKPKISWTCINTTLTCEVMNGTDPELNLYQDGKHLKLSQRVITHKWTTSLSAKFKCTAGNKVSKESSVEPVSCPGGSILGQSNGLSAWTPPSHPTSLPFAEKGLDIYLIIGICGGGSLLMVFVALLVFYITKRKKQRSRRNDEELETRAHRVATEERGRKPHQIPASTPQNPATSQHPPPPPGHRSQAPSHRPPPPGHRVQHQPQKRPPAPSGTQVHQQKGPPLPRPRVQPKPPHGAAENSLSPSSN

SEQ ID NO: 163 - DNA, 1144 bp, Mus musculus
gcctcaccacagtcctgacagaaagaactcagagtcacccctgggaaaagaactctaaagatgaaatgtaaattcctgggtagcttctttctgctcttcagcctttccggcaaaggggcggactgcagagacaatgagaccatctggggtgtcttgggtcatggcatcaccctgaacatccccaactttcaaatgactgatgatattgatgaggtgcgatgggtaaggaggggcaccctggtcgcagagtttaaaaggaagaagccaccttttttgatatcagaaacgtatgaggtcttagcaaacggatccctgaagataaagaagccgatgatgagaaacgacagtggcacctataatgtaatggtgtatggcacaaatgggatgactaggctggagaaggacctggacgtgaggattctggagagggtctcaaagcccatgatccactgggaatgccccaacacaaccctgacctgtgcggtcttgcaagggacagattttgaactgaagctgtatcaaggggaaacactactcaatagtctcccccagaagaacatgagttaccagtggaccaacctgaacgcaccattcaagtgtgaggcgataaacccggtcagcaaggagtctaagatggaagttgttaactgtccagagaaaggtctgtccttctatgtcacagtgggggtcggtgcaggaggactcctcttggtgctcttggtggcgctttttattttctgtatctgcaagaggagaaaacggaacaggaggagaaaagatgaagagctggaaataaaagcttccagaacaagcactgtggaaaggggccccaagccgcactcaaccccagccgcagcagcgcagaattcagtggcgctccaagctcctcctccacctggccatcacctccagacacctggccatcgtcccttgcctccaggccaccgtacccgtgagcaccagcagaagaagagacctcctccatcaggcacacagattcaccagcagaaaggccctcctttacccagaccccgagttcagccaaaacctccctgtgggagtggagatggtgtttcactgccgccccctaattaagaaggcagagttcgtcatttccaataaaaagctgtgtggatttatcttc

SEQ ID NO: 164 - protein, 344 aa, Mus musculus
MKCKFLGSFFLLFSLSGKGADCRDNETIWGVLGHGITLNIPNFQMTDDIDEVRWVRRGTLVAEFKRKKPPFLISETYEVLANGSLKIKKPMMRNDSGTYNVMVYGTNGMTRLEKDLDVRILERVSKPMIHWECPNTTLTCAVLQGTDFELKLYQGETLLNSLPQKNMSYQWTNLNAPFKCEAINPVSKESKMEVVNCPEKGLSFYVTVGVGAGGLLLVLLVALFIFCICKRRKRNRRRKDEELEIKASRTSTVERGPKPHSTPAAAAQNSVALQAPPPPGHHLQTPGHRPLPPGHRTREHQQKKRPPPSGTQIHQQKGPPLPRPRVQPKPPCGSGDGVSLPPPN

SEQ ID NO: 165 - DNA, 1086 bp, Homo sapiens; identical to SEQ ID NO: 145

SEQ ID NO: 166 - protein, 250 aa, Homo sapiens; identical to SEQ ID NO: 146

SEQ ID NO: 167 - DNA, 1097 bp, Homo sapiens
ctttttctagccaggctctcaactgtctcctgcgttgctgggaagttctggaaggaagcatgtgctccagaggttgggattcgtgtctggctctggaattgctactgctgcctctgtcactcctggtgaccagcattcaaggtcacttggtacatatgaccgtggtctccggcagcaacgtgactctgaacatctctgagagcctgcctgagaactacaaacaactaacctggttttatactttcgaccagaagattgtagaatgggattccagaaaatctaagtactttgaatccaaatttaaaggcagggtcagacttgatcctcagagtggcgcactgtacatctctaaggtccagaaagaggacaacagcacctacatcatgagggtgttgaaaaagactgggaatgagcaagaatggaagatcaagctgcaagtgcttgaccctgtacccaagcctgtcatcaaaattgagaagatagaagacatggatgacaactgttatctgaaactgtcatgtgtgatacctggcgagtctgtaaactacacctggtatggggacaaaaggcccttcccaaaggagctccagaacagtgtgcttgaaaccacccttatgccacataattactccaggtgttatacttgccaagtcagcaattctgtgagcagcaagaatggcacggtctgcctcagtccaccctgtaccctggcccggtcctttggagtagaatggattgcaagttggctagtggtcacggtgcccaccattcttggcctgttacttacctgagatgagctcttttaactcaagcgaaacttcaaggccagaagatcttgcctgttggtgatcatgctcctcaccaggacagagactgtataggctgaccagaagcatgctgctgaattatcaacgaggattttcaagttaacttttaaatactggttattatttaattttatatccctttgttgttttctagtacacagagatatagagatacacatgcttttttcccacccaaaattgtgacaacattatgtgaatgttttattattttttaaaataaacatttgatataattgtcaattaactgaa

SEQ ID NO: 168 - protein, 243 aa, Homo sapiens
MCSRGWDSCLALELLLLPLSLLVTSIQGHLVHMTVVSGSNVTLNISESLPENYKQLTWFYTFDQKIVEWDSRKSKYFESKFKGRVRLDPQSGALYISKVQKEDNSTYIMRVLKKTGNEQEWKIKLQVLDPVPKPVIKIEKIEDMDDNCYLKLSCVIPGESVNYTWYGDKRPFPKELQNSVLETTLMPHNYSRCYTCQVSNSVSSKNGTVCLSPPCTLARSFGVEWIASWLVVTVPTILGLLLT

SEQ ID NO: 169 - DNA, 1205 bp, Mus musculus
atacgacttccggttttgggttttgcttcctgattgaagggcaggcgccctgacttctcttacagttgtctccagtgttctggggaagcttctctaagtattatgtgcttcataaaacagggatggtgtctggtcctggaactgctactgctgcccttgggaactggatttcaaggtcattcaataccagatataaatgccaccaccggcagcaatgtaaccctgaaaatccataaggacccacttggaccatataaacgtatcacctggcttcatactaaaaatcagaagattttagagtacaactataatagtacaaagacaatcttcgagtctgaatttaaaggcagggtttatcttgaagaaaacaatggtgcacttcatatctctaatgtccggaaagaggacaaaggtacctactacatgagagtgctgcgtgaaactgagaacgagttgaagataaccctggaagtatttgatcctgtgcccaagccttccatagaaatcaataagactgaagcgtcgactgattcctgtcacctgaggctatcgtgtgaggtaaaggaccagcatgttgactatacttggtatgagagctcgggacctttccccaaaaagagtccaggatatgtgctcgatctcatcgtcacaccacagaacaagtctacattttacacctgccaagtcagcaatcctgtaagcagcaagaacgacacagtgtacttcactctaccttgtgatctagccagatcttctggagtatgttggactgcaacttggctagtggtcacaacactcatcattcacaggatcctgttaacctgacaagaactcttctcacccaagaaggcaacttggaagcacagagtcttgccttcatccctagcagtgttcctagccagcgaagcaactctggctctattggacaaaggaaaatgtgttactgaacgtctgcgagagtttgcatgcatgctctatgaaacaagcacaggaccttgtacagtgctccaccactgacctgtgtgcccagtcctttacaaagatttcaaatcaaccttttaaaaactgtgcataatatctaattttatataccctagttgtttcccaacatatattaaagataaatgcattctttttaccaaaatgtgactatattattttcatgttttcatatctctttttaaaataaattcttttaaaaaact

SEQ ID NO: 170 - protein, 240 aa, Mus musculus
MCFIKQGWCLVLELLLLPLGTGFQGHSIPDINATTGSNVTLKIHKDPLGPYKRITWLHTKNQKILEYNYNSTKTIFESEFKGRVYLEENNGALHISNVRKEDKGTYYMRVLRETENELKITLEVFDPVPKPSIEINKTEASTDSCHLRLSCEVKDQHVDYTWYESSGPFPKKSPGYVLDLIVTPQNKSTFYTCQVSNPVSSKNDTVYFTLPCDLARSSGVCWTATWLVVTTLIIHRILLT

SEQ ID NO: 171 - DNA, 12123 bp, Homo sapiens
gcagatgggaagaagcgttagagcgagcagcactcacatctcaagaaccagcctttcaaacagtttccagagatggattatcctactttacttttggctcttcttcatgtatacagagctctatgtgaagaggtgctttggcatacatcagttccctttgccgagaacatgtctctagaatgtgtgtatccatcaatgggcatcttaacacaggtggagtggttcaagatcgggacccagcaggattccatagccattttcagccctactcatggcatggtcataaggaagccctatgctgagagggtttactttttgaattcaacgatggcttccaataacatgactcttttctttcggaatgcctctgaagatgatgttggctactattcctgctctctttacacttacccacagggaacttggcagaaggtgatacaggtggttcagtcagatagttttgaggcagctgtgccatcaaatagccacattgtttcggaacctggaaagaatgtcacactcacttgtcagcctcagatgacgtggcctgtgcaggcagtgaggtgggaaaagatccagccccgtcagatcgacctcttaacttactgcaacttggtccatggcagaaatttcacctccaagttcccaagacaaatagtgagcaactgcagccacggaaggtggagcgtcatcgtcatccccgatgtcacagtctcagactcggggctttaccgctgctacttgcaggccagcgcaggagaaaacgaaaccttcgtgatgagattgactgtagccgagggtaaaaccgataaccaatataccctctttgtggctggagggacagttttattgttgttgtttgttatctcaattaccaccatcattgtcattttccttaacagaaggagaaggagagagagaagagatctatttacagagtcctgggatacacagaaggcacccaataactatagaagtcccatctctaccagtcaacctaccaatcaatccatggatgatacaagagaggatatttatgtcaactatccaaccttctctcgcagaccaaagactagagtttaagcttattcttgacatgagtgcattagtaatgactcttatgtactcatgcatggatctttatgcaatttttttccactacccaaggtctaccttagatactagttgtctgaattgagttactttgataggaaaaatacttcattacctaaaatcatttttcatagaactgtttcagaaaacctgactctaactggtttatatacaaaagaaaacttactgtatcatataacagaatgatccaggggagattaagctttgggcaagggctatttaccagggcttaaatgttgtgtctagaattaagtatgggcataaactggcttctgaatccctttccagagtgttggatccatttccctggtcttggcctcactctcatgcaggctttcctcttgtgttggcaagatggctgccaactcttggcaattcatacatccttgtttctgtctggtagagagtttgcttctcaaatggagcaaacaaatttgattattttttcattgttaaataggcaacatgaccagaaaggatggaatggcttaagtaaactaagggttcacttctagagctgagaagcagggtcaaagcacaatactgggcaattcagagcatggttagaagaggaaaggggagtctcaaagctggagagtttaccaacaaatattgactgcagtgattaaccaagacatttttgttaactaaaaagtgaaatatgggatggattctagaaatggggtatctctgtccatacttctagaatccactctatcagcatagtccagaagaatacctggcagtagaagaaatgaatattcaagaggaagataaatgcgagagggcaatcctttactattctcatatttatttatctctcattctgtatagaattcttgccgccatcccaggtctagccttaggagcaaatgtagtagatagtcgaataataaataacttaatgttttggacatattttgtctacttttgagaattatttttaatatgtaaattctctcaaaagggtcaggcacctagttattattttttaatgattatgtgaaagttgaatataatataccactaaaagtgacagttgaaagtggtggcataggacggtagggtagaaatttgggagggaaaaaagaaattgggagggtacaggcaacaggagaaaggaatcaaaccacagaaaaatacaaagggaaacttctgcttcactattcagacaaagacagccctaatgacatcaccaacagtcaaagcaattagagaccatacctaatattgtttaaattctagatgtaggctaacaatgaaaagtatttgccaaactgaataaaactgtcatggttaccttgaaaggacaatggttattgttaaatatagtgatcattcatgtctaaaagattcattatttatctctaaagatttctaaagaccaccatctagaaaagattcattatgaaggctgtatttaaatatcaaagttgtggacttcatgataatcttaaataaagcaaatccaaattctcctgttgcctagacagattctaagatgtaatttacacttttaagctaattagtgagtattttatgattttagccttaaacaccatgtatgccaaataatgcacttgttttgtgaattacagaaatggtaagtgcccacatttctgtgaattataaaatttgtgagtttcttttaacccttttcaggagtgaaaaaataaaaacgaccatttcctggttgtgcttaagtatatgcaagaagggtaaactctcatttttattatgtttgcttaaagatctttttatacctggattcatgaaatgtttccacaaatatattagtgtaacaaacttgaaaggcagtttacaagaaagcactctactatcagatcaatcaaagattctgtgagtgaatttattggtttgcatggtgaagcaagcttagcatcaattaaaaggtaaataatttcttttctgaatggtaaagacaatcaaaatattactttctggaaaactccaataaccaaattctcaatgattagtgtatgtgagcaggaaaacatttttacagttgtagtatggggaaatataaatccaattttaagagagaaaattatgactgggtgtggaagggacagtatagtcagataccattgtcatggtggtttttactgggaacttcatgaaagacttttgtagcaaaccactgcagtattgcaaagcctccagaacatttggaacttgtctctttttccttgtgtgtgtttgtgtttttggtctctcattcaaaatattgatgagaactatttactctgtcctttcttctctatatattcttcctctacagagtgtagggttttttcaggaatttggagccatctgaagtcctcccaaaaattctctgacgtcttctgatgctcctgttataccctcaggggtaatgcttgtgaaattccattcattcattttctttctctggacatctttacttaccaaagcactttcattgtcatctttttaacatcattcttaattcgtgatagttttgggactctccctagtgtatgtttctccccctctactcttttgcacctatgattctgattgttactaagaaagcagatgaaaaacagatccacagaataaacgatcagaattccagtaaattctattttaaatacagatactttttacaagttgctgctttggaagcaaaatgcttcttaagttttacatatatatatatatatatacatatatatatacacatataatttatatcgatggataatacattaagaatctatgcttcctttgaatgccattaatatttatgttaaagtaaccaatgaaaggaaattactttgttataataagataggaagacttgttaatggagtacacagttttgtcagggaaagaacacatcttattgaactatgatgactatgcattgactatattattataagagataccttcaaactttatttaaagaactttaggtataatatgttgagaaaataaaatagaaatttcatttacttgtaatcatgcttaaaatgggaggcaggtaggtgaagatataatttttagtaaaaactccaatttatgttttaagtaattcagtgtattactaaaatactatatatataaacttaaaatacatgggttatcaatttaaaagacaaagtaagtaaaaatacttttagtaggcattcgtggattgtgaacatccaagttatattggtttgtatagaatggcattaagtaaaaattacagctgtataacagtagttttctaaattgagagagtccacattgtaattagagatcactgtgaccaaaatgcttctccttgatttataatgatgtactgtattttgtactgcttatatgaaatttcagcaagattgacgatattataaagatgcttataaagtgtaagtggagacgctaaattgtgagtacaaagtttctttttcacaacagtgataagaaaatatctttaaaaaatataagacaatataaacatgtcatcattagtttagctactattaaaatgtaacatctagaaagtactgatctccaccttcagacttctgtataagtatattttttcactgatctgttcattagagttcttccagccaagactctgggctcttaaaacatgtatctgaaaactaaaaacaagttaatttttttaaaagcttctctatttctagtgattcaataggtagaaaaatagcttctagaattaactgcaatgctttctaaggaaattttataaatcctcaaggtcggtttacacatatttttccagattcagagcactaactatcttgtaagatgtaagaaaaggtccatttggaagtatgagtaataaatgtctgggataattctggtttatttcgtattatccttgttagaataagttatatggtcaacctgttcagaacactttttctagtgttagtgtgtacttttggatttttggttcttgtagggtatagaaatattttcctttgtcttgtattctgttgttttgaatgaataaaacacaatgtttcacgatcactactttcatttgccatggagaaatagcagggaaaaatttctacagaataaaattaactgatgaattacatgcagaaaaaattcaaatcaatgatacattgtaatttttatctcaatgcaatgttctttgtattttattttattattatttttttgagacggagtttcacttttgttgcccgggctggagtgcaatggcacaatctcggctcaccacaacctctgcctcccggattcaagtgattctcctgcctcagcctcctgaatagctgggattacaggcatatgccaacatgcctggctaattttgtatttttagtggagacggggtttctccacgttggtcagacttgtcttgaactctggacctcaggtgatccacctgcctcagcctcctaaattgctgggattacaggcatgagcgaccactcctggccttgttctttgtattttataagtgcatgtagtgcaaagggtcaaagggctttacaggttttttgtttgtttgtttttgtttttcccgaaacatagtagtcccttgcccttcctcatttttgttaccttgagacaacaaattttactacttctaactcattattttatttatgttcacttttctgaatagcatgcttatgacactaatactttttttttcaattttagacattcattattcatttagatgtctttctctccccaaactcaccacataaaatactcttctcatgtctctttcagaaatatttgtattaaaatatgattatatcaatatttggcatttatttcttatgaccttgccagtactcttagttaaactacatggtaaaaatgattttgctttccctcctacataactttttttccacctagagctaataattgtcattctggggactgactttttctgtatttaccataaattgacctgaaactcccctgtgatgcagcaggaattctaccaacgtcaacttccttagaaagactccattagaagcttgacttggggctagaaggagaggcacacaactgccatcctggtgtctcccttcatccagaaaaagggggaggaatacatgaaacctagaatccactctaaaacattttccagaacaaaaggacatgtgtttccgtgttgtaaatgtttaacgagtgcccataacaaggaataataagtctattatgtttgcttttgtgtctgtaaaagttgggggtattggttgtaagcacgaaaacagatactgactgttgaagaaaaaaaaaaatacgaggtcaggagtttgagaccaacttggccaatatggtgaaaccctgtcttagtaaaaatagaaaaattagccaggcctggtggcacgcacctgtagtcccagctacttgggaggctgaggcagaagaatcgcttgaacccgggaggcagaggttgcagtgagccaagatcgcaccactgcactccaccctgggcaacagagcgagactccgtctcaaaaaaaaaaaaaaaaaaaaaaaaaaaaagttaagtatttgaacataggggtggctcatagaattcccaggacacccgatggagtaggcttgcaaaacacaacatgtggcaactccagtgggaaacgaggcaggaaacactcgtttcctgcagaaagcaacaatttgggcttcgataccctccctagaacacagggcagtgaatctgagcagcatcagtaccccacgttcggatgagtcctgagcccctatttttattcactgacttattccaaaatcagtgtctcttaaatatatctggaaggcagcagcttgtatctcccccttcagcttccatagtggcagtcagggtacaacttactttccaaacagaacacactgcgacattccctccaggctcgttgaagaacttcaactgacaaatgtccctcctcgaccagatgatagttttcttaaaggcagggtttaatatacccttttataaatgtttcaaggccctgtgtaatacctgagtttattccagatgtaactaaatatatccaagattgttttaaaataaattgctgaaaaaacaaataaatacagttagtatctatatcaatattctcagttggcagttttgcaataatggccgatagttcatttttagtaacactattgacattgcatttggatattagggtttactaatcatccgcatgtatacattgcatatttttctagactttaactttattcaaatctattgatttttaaacctgcaacttatgtctagacacaggtatacctttacaagaactaccattttttttggtaacatactacctccaaaatttcaagtaagaagttgatttttgtccatttttaaatggaaaacttgtaatcaaaatgccacaaaattatactgtgtatcatttgacctatagaaaccaatattattacaggaagaaagcagagccaatcttctacctgtggtcaaataagtggaggccctttctagactaagttctcatgagtttaaaataccaagcataagttctccaaattcctgaaaaggaagccttgtgttgtattgcccagccatatttgtaagacataaaaataaaacttgagaagaagctatgataacttactttcttcattcttcaaaatttacataatctcaactgattttatgtttttatgaaaatgcattcttaagatatatccttattcaatcatgtattcattacatcctttatgccaggtatccaaaagtacttacagtgactaagaccattattctttgatcagctgcctgagtaagactttgagctctccaatatactctcagtgatactaagttttctgagtaacagctttggatgtggcttcagttgagctgatttatcccacactttatttttatcgtataatggtcctcagaagcaaattttgattttagctcacataaaaaatgtacaaagaaatgtaatggctcagtagcttctagagatagagattactcttctaacctttctgtaattttgtatgtctattttataattctttcaatgtctaatgaatagctatctttttttgagacggagtctcgctctgtcgcccaggctggagtgcagtggtgcgacctcggctcaccgcaagctgcgtcttccaggttcacgccattctcctgcctcagcctcccgagtagctgggacttcaggcgcccaccaccatgcccagctaatttttttgtatttttagtagagacggggtttcaccgtgttagccagggtggtctcgatctcctgacctcgtgatccgcccgcctcggcctcccaacgtgctgggattacaggagtgagccaccgcgcccggcctccttagtttcttaaggtggaagcctagattattgattttatatgttgttttcttttccaatagtggcacttaatgctataaatttcactttgttccacaagttttggtaagctctatttttattttcatttagtccaaaatattttaaaatttcttttgatatttcttctttgagccatgaattatttacaatgtgttgtttaatctctatatattttgggatttttctactttatatctcttacagatttctaacttaatttcatcatgttttaaaaacattctttgtataatttctattcttttaaatttttcaggtgtattttatggcccagaatatggtctatcttgtagaatgtttcatgtgatcttaagaagaatgttcattctgctgttgagtgtaatattctacaaatgtccattagattaaactgattgataccaccgttcagattatctatatcctttctgattttccctcttcttgatctatcacatactgacagatcaagtgatcaagtctcgttaaagactgcaagtaaaatagtggatttttctatttctccttgcagttttgttagtttttgtctcatgtatcttgatactcttgttagtacatatactttcagaatcgttaggttttcttggagaattgacccctttaccacatgtaatgtcccttttattcttgataatctttcttgttctgtctgctttttctgatattaacataactttcagttttttaaaaaattaacattagcatctcacatctttatccttttaattttaaattatctaaatatttatatttaatgtgcctttcttatagacaatgtatagttgcgtctatttgtaatttccccacttttcttacttaaaaatgttgtagatatataggagttgtatatatttggggggtacatgtgatgttttgatacctgtatacaatatgtaatgatcatattgggtaatcgtgatatctgtcacctctaacattcatcttttttgtgtgtttaaacccaccacttctaattggtacatttagattattcaaatttaagtgattattgatatagttggattaatatctactatgtttgtaacttttctatccttgcactcgttctttcttttttatcctcctttttctgtgttctctgattttaactggggtttttacatgatttaattttctctcgtggcatatctttcattgatcaacctaggtttttctccttttcccctcttttttttggtatttattctatttagtgttatctgagctacctgagttggtgtctatcactaattttggcaagttcccagacgttattacttctaacattcttttgctccattctttcttcttcttcaattattccatagtcttgaatattctgggtttttcccactctttgaattttagtttgaaaagtttctattggcctagcttcaaagtcattcattcttccttcggggttccaagtcaactgataattgcatcaaagatatccttcctttctattactatgttttttattgctaccatttcttttttattccttcttagtgtttccatctttcttcttacattatccatctgttgtctatttttttcatgagagctcttaacatattaatgataagttccatgtctgataattctgacacgtgtcatgtctctatctggttccaatgattgctttatctcttcagaccatgacttttcttgccttttgacgttctttgacattttttttgaattttttgttgcaagccagatctggtgtgttatgtaataggaacaggtaaataagtctttagcttgcagacttatcttaatctgactaactattagactgtgtttaaagtctgttataaccataggtgctaaatttcttcaaattcctctagtgtctttgttttgtttgttcatgtgtttttccccttcttgagttcaggcttccctaagtgctcctcttcagagagactttctgtctttcagctctttcctctgcaattcactgttactatactggagccctgttggtgtagtactaagctgtgggaaaggagagtgctctgtaatcttacagtgaaatctcagtcttttagtgggtctgtgtctgggacattcacagagcttctccagtggtattgcttcctcatcctcaactctctttcctggctgcagcattcccaatgtatttctttgaaggcctgccccctgttgactgttattttccctctttccttaagtgggacagggagacttcaggggctgggatgaggtttgggaattgtgcttggcagagtcctttccatctttgttaccaagaaggttcatggcttatttctcaatggatgtccctctctatctgttgccagagccacgaggaaatttttcttggatcctcataatgagaaccttggagtttcctactggaaaagcccttgaatgtgtggagtgcctcaagagcacagcccccatgggtttcttgctcacaccagtccacaaacagatgccagcaattcacccaacttaccatataaaggctcatactagtttatggctccagtgctttgactccagataaatggctattggttgcgtatctctctggatgtatctgtatctccagattttggggtggcagtttgctcaggaccttggttctctaataggtctaataagaaaagtcattgattttcagctttccaactttccagctttgtcttgttataagcatggcagcaacatcttccatgccttaacatgatgacactaaaggcagaagtcgatctccatgtataaacattttaacacatatgttttttgttatcgtggtttctgacctgtctctttgccctgactttctgatactgcactagggttcctgttgctggactccattccatatgacttgctctcgtctaggctgctctttggctcatctttataaatcatgatccaaaatgaagcacatatttattttttaaataaatatgaaatgaagtatagacatcaaactgaagatgagtagatcatactgagtttcactgtctgtgcttggatcaacatcaggccttatacaaatattcaagtccagaggcaaaaggtaataaggaaaatttgtagcacaagccacaaggagataacatgtcaagtctatgcgattggaaataaactaaagatgaactgctggggatgctcactcatcacagagctcagtctaaagcaccagatttcacaagcattttttgggggaaattctgttaaaatgaaatatgagtcacatggtggtgtttcactcatcatatgtgttcaatattaattcattttaaggtttagttgcacaaaaggtaaatgagaattagaagactccatgggtaagaggagccacagaagtaaagcattgtcaagggttctatgtctatatatttagatattaggcttctgagaaaaaaacacaataggaaggaagatgaacacaacagagggcagaaggtctatacgtcctgaggccttttatgcaacgtttgtttgtggaatgttttttaagaatgtgtgagagtcattttaatgtgaaataaagacctacgtctaca

SEQ ID NO: 172 - protein, 336 aa, Homo sapiens
MDYPTLLLALLHVYRALCEEVLWHTSVPFAENMSLECVYPSMGILTQVEWFKIGTQQDSIAIFSPTHGMVIRKPYAERVYFLNSTMASNNMTLFFRNASEDDVGYYSCSLYTYPQGTWQKVIQVVQSDSFEAAVPSNSHIVSEPGKNVTLTCQPQMTWPVQAVRWEKIQPRQIDLLTYCNLVHGRNFTSKFPRQIVSNCSHGRWSVIVIPDVTVSDSGLYRCYLQASAGENETFVMRLTVAEGKTDNQYTLFVAGGTVLLLLFVISITTIIVIFLNRRRRRERRDLFTESWDTQKAPNNYRSPISTSQPTNQSMDDTREDIYVNYPTFSRRPKTRV

SEQ ID NO: 173 - DNA, 2487 bp, Mus musculus
acacagaagacttcttgacttcaggagacactgctgtatgaaacagtgcttgctatcagtggctgctggaagaggctgtggtggaaagaaaacctcaactgcaggccagagttggttccccaaaagaggcaaactcccagtgctagccagaggctaggaagctctaagcaacccacttatctgcaaggagagttacgcccaaagagcatcaagtccaacctcctgaactgtttccagagatggcttatgttacttggcttttggctattcttcatgtgcacaaagcactgtgtgaagagacattgtgggacacaacagttcggctttctgagactatgactctggaatgtgtatatccattgacgcataacttaacccaggtggagtggaccaagaacactggcacaaagacagtgagcatagcagtttacaaccctaaccataatatgcatatagaatctaactacctccatagagtacacttcctaaactcaacagtggggttccgcaacatgagcctttccttttacaatgcctcagaagcagacattggcatctactcctgcttgtttcatgctttcccaaatggaccttgggaaaagaagataaaagtagtctggtcagatagttttgagatagcagcaccctcggatagctacctgtctgcagaacctggacaagatgtcacactcacttgccagcttccaaggacttggccagtgcaacaagtcatatgggaaaaagtccagccccatcaggtagacatcttagcttcctgtaacctatctcaagagacaagatacacttcaaagtacctaagacaaacaaggagcaactgtagccaggggagcatgaagagcatcctcatcattccaaatgccatggccgctgactcaggactttacagatgtcgctcagaggccattacaggaaaaaacaagtcctttgtcataaggctgatcataactgatggtggaaccaataaacattttatccttcccatcgttggagggttagtttcactgttacttgtcatcctaattatcatcattttcattttatataacaggaagagacggagacaggtgagaattccacttaaagagcccagggataaacagagtaaggtagccaccaactgcagaagtcctacttctcccatccagtctacagatgatgaaaaagaggacatttatgtaaactatccaactttctctcgaagaccaaaaccaagactctaagctgctcttttggcctgaacacattagtgatgacttctatggcatggaattttacccatgatttccttaccactaggatctacattgataaaaaaaattgattaaatttatttcatctcatatatagaagtactttattacctggaaacattcttaatagagattcattagaaaacccaaatctaatgttcatgtgttcaaggaaccttcttccattatgtaacagaacagtctagagaagattaaggaccacatggctttcttgctctacttgaaattaattgtgagcataagcttgtttctggagtcttcttacattgttggttctacttacatactactggtccaactctcatgctgtttctctcagatgttcccatgatggttgccaaggacacttgatagaaagactactggttaaacacaataaacaaagttcattattcacttattagcaagaaggtagcattatcataaaggattagatgacttaagttagctataggttcaagacctggactaaagtattacttggaaattctgagtattgctaaaaaggaggatgaaagggacctagaagttgagttattactaaaaactttgagtgcgaagatattactcattaaccagataacaagtgaatatgctgtagcatcaacataattcaaaagagtaaagaaatggctaggaatgaggtagttgtgtaattatttcttctcttactagtttcaaataaattcatctctaattctatagagaattcttgcctcccattcaggactggccttctatacagtgagatggtccagtaagaaataatttttattagtgttttttctattttgagaattattttaatatatattttaatatataaacttgtgagttaaattttttttttgcaaaattagcacatgaaaagagattgatggttttaagtagtagaacacagtagtgtaggaatctgagagcagagagtttgggagggggtgaagagaaaacaacatcaccaaatagtgatatataagagaaaatctgtgcttcagagtttgatcagggccatctctcccaactctgctggaactgagagaatgcacctgatgttgtctccattttagatagagaaaaaaaaaacccgaatatttataaaactaaataaaactatagttacctcaaaactatggggatcactataacatagaatagaatagaatagaatagaatagaatagaatagaatagaatag

SEQ ID NO: 174 - protein, 333 aa, Mus musculus
MAYVTWLLAILHVHKALCEETLWDTTVRLSETMTLECVYPLTHNLTQVEWTKNTGTKTVSIAVYNPNHNMHIESNYLHRVHFLNSTVGFRNMSLSFYNASEADIGIYSCLFHAFPNGPWEKKIKVVWSDSFEIAAPSDSYLSAEPGQDVTLTCQLPRTWPVQQVIWEKVQPHQVDILASCNLSQETRYTSKYLRQTRSNCSQGSMKSILIIPNAMAADSGLYRCRSEAITGKNKSFVIRLIITDGGTNKHFILPIVGGLVSLLLVILIIIIFILYNRKRRRQVRIPLKEPRDKQSKVATNCRSPTSPIQSTDDEKEDIYVNYPTFSRRPKPRL

SEQ ID NO: 175 - DNA, 1968 bp, Homo sapiens
gaaggcggaaccacgacgggcagagagcacggagccgggaagcccctgggcgcccgtcggagggctatggagcagcggccgcggggctgcgcggcggtggcggcggcgctcctcctggtgctgctgggggcccgggcccagggcggcactcgtagccccaggtgtgactgtgccggtgacttccacaagaagattggtctgttttgttgcagaggctgcccagcggggcactacctgaaggccccttgcacggagccctgcggcaactccacctgccttgtgtgtccccaagacaccttcttggcctgggagaaccaccataattctgaatgtgcccgctgccaggcctgtgatgagcaggcctcccaggtggcgctggagaactgttcagcagtggccgacacccgctgtggctgtaagccaggctggtttgtggagtgccaggtcagccaatgtgtcagcagttcacccttctactgccaaccatgcctagactgcggggccctgcaccgccacacacggctactctgttcccgcagagatactgactgtgggacctgcctgcctggcttctatgaacatggcgatggctgcgtgtcctgccccacgagcaccctggggagctgtccagagcgctgtgccgctgtctgtggctggaggcagatgttctgggtccaggtgctcctggctggccttgtggtccccctcctgcttggggccaccctgacctacacataccgccactgctggcctcacaagcccctggttactgcagatgaagctgggatggaggctctgaccccaccaccggccacccatctgtcacccttggacagcgcccacacccttctagcacctcctgacagcagtgagaagatctgcaccgtccagttggtgggtaacagctggacccctggctaccccgagacccaggaggcgctctgcccgcaggtgacatggtcctgggaccagttgcccagcagagctcttggccccgctgctgcgcccacactctcgccagagtccccagccggctcgccagccatgatgctgcagccgggcccgcagctctacgacgtgatggacgcggtcccagcgcggcgctggaaggagttcgtgcgcacgctggggctgcgcgaggcagagatcgaagccgtggaggtggagatcggccgcttccgagaccagcagtacgagatgctcaagcgctggcgccagcagcagcccgcgggcctcggagccgtttacgcggccctggagcgcatggggctggacggctgcgtggaagacttgcgcagccgcctgcagcgcggcccgtgacacggcgcccacttgccacctaggcgctctggtggcccttgcagaagccctaagtacggttacttatgcgtgtagacattttatgtcacttattaagccgctggcacggccctgcgtagcagcaccagccggccccacccctgctcgcccctatcgctccagccaaggcgaagaagcacgaacgaatgtcgagagggggtgaagacatttctcaacttctcggccggagtttggctgagatcgcggtattaaatctgtgaaagaaaacaaaacaaaacaaaaacggcttcttggcgtttctgcggggctggggtgttaagtggactggacttttctcgagggattcgaaggggacgggaatcttgtcaccccgggatctggcacccatggtggagtccagtgtggccttagctcccaagcctgcccctcccgagtccactctggctcaattaccccgagaaggagagagcaagtcgcggccacagcgagtgagtgaaccggagcccagatgagagcgctttaatggggctgcgaggtggcggagacagggtcgggatggggtgcagcagttggagacacagggtcagggcccctcatcctctattcactccaccggggcagtgaaagggtcccggcagcgagtgggtc

SEQ ID NO: 176 - protein, 417 aa, Homo sapiens
MEQRPRGCAAVAAALLLVLLGARAQGGTRSPRCDCAGDFHKKIGLFCCRGCPAGHYLKAPCTEPCGNSTCLVCPQDTFLAWENHHNSECARCQACDEQASQVALENCSAVADTRCGCKPGWFVECQVSQCVSSSPFYCQPCLDCGALHRHTRLLCSRRDTDCGTCLPGFYEHGDGCVSCPTSTLGSCPERCAAVCGWRQMFWVQVLLAGLVVPLLLGATLTYTYRHCWPHKPLVTADEAGMEALTPPPATHLSPLDSAHTLLAPPDSSEKICTVQLVGNSWTPGYPETQEALCPQVTWSWDQLPSRALGPAAAPTLSPESPAGSPAMMLQPGPQLYDVMDAVPARRWKEFVRTLGLREAEIEAVEVEIGRFRDQQYEMLKRWRQQQPAGLGAVYAALERMGLDGCVEDLRSRLQRGP

SEQ ID NO: 177 - DNA, 1611 bp, Mus musculus
ctgcgtggaggggaaatgggccagaggctgctggcagggggcctcctctgctgtacacaagctggttttgtagacagtgagagggaagctgatcccagtcccctaaccctgttctgcccaggagcctgagaactgagcttactcgggcaaatgctagggcttcagaaatggaggagctgcctaggagggagaggtcacctcctggggcagccacaccagggtcaactgcacgtgttctccagcctctgttcctaccactgctgctgctgctgctgctgctgcttggtggccagggccagggcggcatgtctggcaggtgtgactgtgccagtgagtcccagaagaggtatggcccgttttgttgcaggggctgcccaaagggacactacatgaaggccccctgcgcagaaccctgtggcaactccacctgccttccctgtccctcggacaccttcttgaccagagacaaccactttaagactgactgtacccgctgccaagtctgtgatgaagaggcccttcaagtgacccttgagaactgctcggcaaagtcggacacccactgtggctgccagtcaggctggtgtgttgactgctccaccgagccatgtgggaaaagctcacctttctcttgtgtcccatgcggggctacaacaccagtccatgaggctccaacccccctgttttgggtccaggtgcttctaggagtcgcgttcctttttggggctatcctgatctgtgcatattgtcgatggcagccttgtaaggccgtggtcactgcagacacagctgggacggagaccctggcctcaccacagactgcccatctctcagcctcagacagcgcccacaccctcctggcacctccaagcagtactgggaaaatctgtaccactgtccagttggtaggcaacaactggacccctggcttatcccagactcaggaggtggtctgcggacaggcctcacaaccctgggatcagctgccaaacagaactcttggaactcctctggcatctccgctctcgccagcgccccctgcgggctctccggctgctgtgctccagcctggcccgcagctctacgatgtgatggatgcggtcccagcacgaaggtggaaggagttcgtgcgcacgctggggctgcgggaagcggaaattgaagccgtggaggtggaaatctgccgcttccgagaccagcagtatgagatgctcaagcgctggcgtcagcagcagcctgcaggcctcggtgccatctatgcggctctggagcgcatgggtctggaaggctgtgccgaggacctgcgcagccgcctgcagcgtggcccgtgatggaaggtccatcagccactttgacaccctagtgacccttgaaggagccttaagtattgttacttatgcgtgtagacattttatgtcaattactaaccccctgccgtggtcctgcgtagcagggctggctgcctcacttttgcttatctgcagcacggagctcctgctaagggaagcgtcatggagaaataccagaaggggccaagtgattggttgctcagctgttaattagcccgagtttggacttggtattaaatttcgtaagaaaagcagctgcttg

SEQ ID NO: 178 - protein, 387 aa, Mus musculus
MEELPRRERSPPGAATPGSTARVLQPLFLPLLLLLLLLLGGQGQGGMSGRCDCASESQKRYGPFCCRGCPKGHYMKAPCAEPCGNSTCLPCPSDTFLTRDNHFKTDCTRCQVCDEEALQVTLENCSAKSDTHCGCQSGWCVDCSTEPCGKSSPFSCVPCGATTPVHEAPTPLFWVQVLLGVAFLFGAILICAYCRWQPCKAVVTADTAGTETLASPQTAHLSASDSAHTLLAPPSSTGKICTTVQLVGNNWTPGLSQTQEVVCGQASQPWDQLPNRTLGTPLASPLSPAPPAGSPAAVLQPGPQLYDVMDAVPARRWKEFVRTLGLREAEIEAVEVEICRFRDQQYEMLKRWRQQQPAGLGAIYAALERMGLEGCAEDLRSRLQRGP

SEQ ID NO: 179 - DNA, 1140 bp, Homo sapiens
ggacttgggcggcccctccgcaggcggaccgggggcaaaggaggtggcatgtcggtcaggcacagcagggtcctgtgtccgcgctgagccgcgctctccctgctccagcaaggaccatgagggcgctggaggggccaggcctgtcgctgctgtgcctggtgttggcgctgcctgccctgctgccggtgccggctgtacgcggagtggcagaaacacccacctacccctggcgggacgcagagacaggggagcggctggtgtgcgcccagtgccccccaggcacctttgtgcagcggccgtgccgccgagacagccccacgacgtgtggcccgtgtccaccgcgccactacacgcagttctggaactacctagagcgctgccgctactgcaacgtcctctgcggggagcgtgaggaggaggcacgggcttgccacgccacccacaaccgtgcctgccgctgccgcaccggcttcttcgcgcacgctggtttctgcttggagcacgcatcgtgtccacctggtgccggcgtgattgccccgggcacccccagccagaacacgcagtgccagccgtgccccccaggcaccttctcagccagcagctccagctcagagcagtgccagccccaccgcaactgcacggccctgggcctggccctcaatgtgccaggctcttcctcccatgacaccctgtgcaccagctgcactggcttccccctcagcaccagggtaccaggagctgaggagtgtgagcgtgccgtcatcgactttgtggctttccaggacatctccatcaagaggctgcagcggctgctgcaggccctcgaggccccggagggctggggtccgacaccaagggcgggccgcgcggccttgcagctgaagctgcgtcggcggctcacggagctcctgggggcgcaggacggggcgctgctggtgcggctgctgcaggcgctgcgcgtggccaggatgcccgggctggagcggagcgtccgtgagcgcttcctccctgtgcactgatcctggccccctcttatttattctacatccttggcaccccacttgcactgaaagaggcttttttttaaatagaagaaatgaggtttcttaaagcttatttttataaagctttttcataaaa

SEQ ID NO: 180 - protein, 300 aa, Homo sapiens
MRALEGPGLSLLCLVLALPALLPVPAVRGVAETPTYPWRDAETGERLVCAQCPPGTFVQRPCRRDSPTTCGPCPPRHYTQFWNYLERCRYCNVLCGEREEEARACHATHNRACRCRTGFFAHAGFCLEHASCPPGAGVIAPGTPSQNTQCQPCPPGTFSASSSSSEQCQPHRNCTALGLALNVPGSSSHDTLCTSCTGFPLSTRVPGAEECERAVIDFVAFQDISIKRLQRLLQALEAPEGWGPTPRAGRAALQLKLRRRLTELLGAQDGALLVRLLQALRVARMPGLERSVRERFLPVH

SEQ ID NO: 181 - DNA, 1805 bp, Homo sapiens
agcagtcagcaacagggtcccgtccttgacacctcagcctctacaggactgagaagaagtaaaaccgtttgctggggctggcctgactcaccagctgccatgcagcagcccttcaattacccatatccccagatctactgggtggacagcagtgccagctctccctgggcccctccaggcacagttcttccctgtccaacctctgtgcccagaaggcctggtcaaaggaggccaccaccaccaccgccaccgccaccactaccacctccgccgccgccgccaccactgcctccactaccgctgccacccctgaagaagagagggaaccacagcacaggcctgtgtctccttgtgatgtttttcatggttctggttgccttggtaggattgggcctggggatgtttcagctcttccacctacagaaggagctggcagaactccgagagtctaccagccagatgcacacagcatcatctttggagaagcaaataggccaccccagtccaccccctgaaaaaaaggagctgaggaaagtggcccatttaacaggcaagtccaactcaaggtccatgcctctggaatgggaagacacctatggaattgtcctgctttctggagtgaagtataagaagggtggccttgtgatcaatgaaactgggctgtactttgtatattccaaagtatacttccggggtcaatcttgcaacaacctgcccctgagccacaaggtctacatgaggaactctaagtatccccaggatctggtgatgatggaggggaagatgatgagctactgcactactgggcagatgtgggcccgcagcagctacctgggggcagtgttcaatcttaccagtgctgatcatttatatgtcaacgtatctgagctctctctggtcaattttgaggaatctcagacgtttttcggcttatataagctctaagagaagcactttgggattctttccattatgattctttgttacaggcaccgagaatgttgtattcagtgagggtcttcttacatgcatttgaggtcaagtaagaagacatgaaccaagtggaccttgagaccacagggttcaaaatgtctgtagctcctcaactcacctaatgtttatgagccagacaaatggaggaatatgacggaagaacatagaactctgggctgccatgtgaagagggagaagcatgaaaaagcagctaccaggtgttctacactcatcttagtgcctgagagtatttaggcagattgaaaaggacaccttttaactcacctctcaaggtgggccttgctacctcaagggggactgtctttcagatacatggttgtgacctgaggatttaagggatggaaaaggaagactagaggcttgcataataagctaaagaggctgaaagaggccaatgccccactggcagcatcttcacttctaaatgcatatcctgagccatcggtgaaactaacagataagcaagagagatgttttggggactcatttcattcctaacacagcatgtgtatttccagtgcaattgtaggggtgtgtgtgtgtgtgtgtgtgtgtgtgtgtgtatgactaaagagagaatgtagatattgtgaagtacatattaggaaaatatgggttgcatttggtcaagattttgaatgcttcctgacaatcaactctaatagtgcttaaaaatcattgattgtcagctactaatgatgttttcctataatataataaatatttatgtagatgtgcatttttgtgaaatgaaaacatgtaataaaaagtatatgttaggatacaaataa

SEQ ID NO: 182 - protein, 281 aa, Homo sapiens
MQQPFNYPYPQIYWVDSSASSPWAPPGTVLPCPTSVPRRPGQRRPPPPPPPPPLPPPPPPPPLPPLPLPPLKKRGNHSTGLCLLVMFFMVLVALVGLGLGMFQLFHLQKELAELRESTSQMHTASSLEKQIGHPSPPPEKKELRKVAHLTGKSNSRSMPLEWEDTYGIVLLSGVKYKKGGLVINETGLYFVYSKVYFRGQSCNNLPLSHKVYMRNSKYPQDLVMMEGKMMSYCTTGQMWARSSYLGAVFNLTSADHLYVNVSELSLVNFEESQTFFGLYKL

SEQ ID NO: 183 - DNA, 1935 bp, Mus musculus
tgaggcttctcagcttcagatgcaagtgagtgggtgtctcacagagaagcaaagagaagagaacaggagaaaggtgtttcccttgactgcggaaactttataaagaaaacttagcttctctggagcagtcagcgtcagagttctgtccttgacacctgagtctcctccacaaggctgtgagaaggaaaccctttcctggggctgggtgccatgcagcagcccatgaattacccatgtccccagatcttctgggtagacagcagtgccacttcatcttgggctcctccagggtcagtttttccctgtccatcttgtgggcctagagggccggaccaaaggagaccgccacctccaccaccacctgtgtcaccactaccaccgccatcacaaccactcccactgccgccactgacccctctaaagaagaaggaccacaacacaaatctgtggctaccggtggtatttttcatggttctggtggctctggttggaatgggattaggaatgtatcagctcttccacctgcagaaggaactggcagaactccgtgagttcaccaaccaaagccttaaagtatcatcttttgaaaagcaaatagccaaccccagtacaccctctgaaaaaaaagagccgaggagtgtggcccatttaacagggaacccccactcaaggtccatccctctggaatgggaagacacatatggaaccgctctgatctctggagtgaagtataagaaaggtggccttgtgatcaacgaaactgggttgtacttcgtgtattccaaagtatacttccggggtcagtcttgcaacaaccagcccctaaaccacaaggtctatatgaggaactctaagtatcctgaggatctggtgctaatggaggagaagaggttgaactactgcactactggacagatatgggcccacagcagctacctgggggcagtattcaatcttaccagtgctgaccatttatatgtcaacatatctcaactctctctgatcaattttgaggaatctaagacctttttcggcttgtataagctttaaaagaaaaagcattttaaaatgatctactattctttatcatgggcaccaggaatattgtcttgaatgagagtcttcttaagacctattgagattaattaagactacatgagccacaaagacctcatgaccgcaaggtccaacaggtcagctatccttcattttctcgaggtccatggagtggtccttaatgcctgcatcatgagccagatggaaggaggtctgtgactgagggacataaagctttgggctgctgtgtgacaatgcagaggcacagagaaagaactgtctgatgttaaatggccaagagaattttaaccattgaagaagacacctttacactcacttccagggtgggtctacttactacctcacagaggccgtttttgagacatagttgtggtatgaatatacaagggtgagaaaggaggctcatttgactgataagctagagactgaaaaaaagacagtgtctcattggcaccatctttactgttacctaatgttttctgagccgacctttgatcctaacggagaagtaagagggatgtttgaggcacaaatcattctctacatagcatgcatacctccagtgcaatgatgtctgtgtgtttgtatgtatgagagcaaacagattctaaggagtcatataaataaaatatgtacattatggagtacatattagaaacctgttacatttgatgctagatatctgaatgtttcttggcaataaactctaatagtcttcaaaatcttttattatcagctactgatgctgtttttctttaatacaactagtatttatgctctgaacatcctaatgaggaaaagacaaataaaattatgttatagaatacagaaatgccttaaggacatagactttggaaa

SEQ ID NO: 184 - protein, 279 aa, Mus musculus
MQQPMNYPCPQIFWVDSSATSSWAPPGSVFPCPSCGPRGPDQRRPPPPPPPVSPLPPPSQPLPLPPLTPLKKKDHNTNLWLPVVFFMVLVALVGMGLGMYQLFHLQKELAELREFTNQSLKVSSFEKQIANPSTPSEKKEPRSVAHLTGNPHSRSIPLEWEDTYGTALISGVKYKKGGLVINETGLYFVYSKVYFRGQSCNNQPLNHKVYMRNSKYPEDLVLMEEKRLNYCTTGQIWAHSSYLGAVFNLTSADHLYVNISQLSLINFEESKTFFGLYKL

SEQ ID NO: 185 - DNA, 1713 bp, Homo sapiens
gaccaggagtcagtttggcggttatgtgtggggaagaagctgggaagtcaggggctgtttctgtggacagctttccctgtcctttggaaggcacagagctctcagctgcagggaactaacagagctctgaagccgttatatgtggtcttctctcatttccagcagagcaggctcatatgaatcaaccaactgggtgaaaagataagttgcaatctgagatttaagacttgatcagataccatctggtggagggtaccaaccagcctgtctgctcattttccttcaggctgatcccataatgcatcctcaagtggtcatcttaagcctcatcctacatctggcagattctgtagctggttctgtaaaggttggtggagaggcaggtccatctgtcacactaccctgccactacagtggagctgtcacatccatgtgctggaatagaggctcatgttctctattcacatgccaaaatggcattgtctggaccaatggaacccacgtcacctatcggaaggacacacgctataagctattgggggacctttcaagaagggatgtctctttgaccatagaaaatacagctgtgtctgacagtggcgtatattgttgccgtgttgagcaccgtgggtggttcaatgacatgaaaatcaccgtatcattggagattgtgccacccaaggtcacgactactccaattgtcacaactgttccaaccgtcacgactgttcgaacgagcaccactgttccaacgacaacgactgttccaatgacgactgttccaacgacaactgttccaacaacaatgagcattccaacgacaacgactgttctgacgacaatgactgtttcaacgacaacgagcgttccaacgacaacgagcattccaacaacaacaagtgttccagtgacaacaactgtctctacctttgttcctccaatgcctttgcccaggcagaaccatgaaccagtagccacttcaccatcttcacctcagccagcagaaacccaccctacgacactgcagggagcaataaggagagaacccaccagctcaccattgtactcttacacaacagatgggaatgacaccgtgacagagtcttcagatggcctttggaataacaatcaaactcaactgttcctagaacatagtctactgacggccaataccactaaaggaatctatgctggagtctgtatttctgtcttggtgcttcttgctcttttgggtgtcatcattgccaaaaagtatttcttcaaaaaggaggttcaacaactaagtgtttcatttagcagccttcaaattaaagctttgcaaaatgcagttgaaaaggaagtccaagcagaagacaatatctacattgagaatagtctttatgccacggactaagacccagtggtgctctttgagagtttacgcccatgagtgcagaagactgaacagacatcagcacatcagacgtcttttagaccccaagacaatttttctgtttcagtttcatctggcattccaacatgtcagtgatactgggtagagtaactctctcactccaaactgtgtatagtcaacctcatcattaatgtagtcctaattttttatgctaaaactggctcaatccttctgatcattgcagttttctctcaaatatgaacactttataattgtatgttctttttagaccccataaatcctgtatacatcaaagagaa

SEQ ID NO: 186 - protein, 364 aa, Homo sapiens
MHPQVVILSLILHLADSVAGSVKVGGEAGPSVTLPCHYSGAVTSMCWNRGSCSLFTCQNGIVWTNGTHVTYRKDTRYKLLGDLSRRDVSLTIENTAVSDSGVYCCRVEHRGWFNDMKITVSLEIVPPKVTTTPIVTTVPTVTTVRTSTTVPTTTTVPMTTVPTTTVPTTMSIPTTTTVLTTMTVSTTTSVPTTTSIPTTTSVPVTTTVSTFVPPMPLPRQNHEPVATSPSSPQPAETHPTTLQGAIRREPTSSPLYSYTTDGNDTVTESSDGLWNNNQTQLFLEHSLLTANTTKGIYAGVCISVLVLLALLGVIIAKKYFFKKEVQQLSVSFSSLQIKALQNAVEKEVQAEDNIYIENSLYATD

SEQ ID NO: 187 - DNA, 1909 bp, Mus musculus
gtcagtaccatgaatcagattcaagtcttcatttcaggcctcatactgcttctcccaggcgctgtggattcttatgtggaagtaaagggggtggtgggtcaccctgtcacacttccatgtacttactcaacatatcgtggaatcacaacgacatgttggggccgagggcaatgcccatcttctgcttgtcaaaatacacttatttggaccaatggacatcgtgtcacctatcagaagagcagtcggtacaacttaaaggggcatatttcagaaggagatgtgtccttgacgatagagaactctgttgagagtgacagtggtctgtattgttgtcgagtggagattcctggatggtttaatgatcagaaagtgaccttttcattgcaagttaaaccagagattcccacacgtcctccaagaagacccacaactacaaggcccacagctacaggaagacccacgactatttcaacaagatccacacatgtaccaacatcaaccagagtctctacctccactcctccaacatctacacacacatggactcacaaaccagaacccactacattttgtccccatgagacaacagctgaggtgacaggaatcccatcccatactcctacagactggaatggcactgtgacatcctcaggagatacctggagtaatcacactgaagcaatccctccagggaagccgcagaaaaaccctactaagggcttctatgttggcatctgcatcgcagccctgctgctactgctccttgtgagcaccgtggctatcaccaggtacatacttatgaaaaggaagtcagcatctctaagcgtggttgccttccgtgtctctaagattgaagctttgcagaacgcagcggttgtgcattcccgagctgaagacaacatctacattgttgaagatagaccttgaggggcagaatgagtaccagtggccctctgagggaccttctgcctgagatttatagagactgtcactgatgtcatagagtcacacccattacagcgccaaggcgattttctgtgttggttcttccagctgcagcagagagggtaaccctctactgtgtatactcaaaactcagattaacatcatcctaattttggtatctgcaccacctccgtgtctctgctcactacagagattctctcaaacatgaacgttttagaagtttgtgtttcccttagtcaatgtaatcattggtaatactattctattcttggttactaaaaccattactaagagagggataggaattaaaagttggtgtgaggggcctcctgaatttagaagcacttgattctgttttatctactttcttgaaatgttacttctacccttcccaatgggtaaaatcatgggagcatggtgccctcatagataaatagaagagagtctattgctgccaatatagatggttatgctttctcatagctctgaaaatatgacacatttattatgaggttgatcttaggataaggataggtgttttatgtcaggagaggttatcatggtgaatatggaccagcagacagcagtggaggaaaataatgaaccaagggattgagttcattagtgctaattctactccactcctgtctttatgctcctaaacttactgactgagctctgaattaggtgctaggaggagacaatgcagacatgaaaggggaaggagcgccttcaggacacaggctctctgctgagagaagtcctatttgcaggtgtgatagaggttgggacaatctctgagttgtaaatttctaattgtcttcaggccatatttatagttaaattcatttccgaaagacatagcatcttccccaatgggtcagtttgtcaaaatcaataaaatattttgttttgctaagaattaaaaaaaaaaaaaaaaaaa

SEQ ID NO: 188 - protein, 305 aa, Mus musculus
MNQIQVFISGLILLLPGAVDSYVEVKGVVGHPVTLPCTYSTYRGITTTCWGRGQCPSSACQNTLIWTNGHRVTYQKSSRYNLKGHISEGDVSLTIENSVESDSGLYCCRVEIPGWFNDQKVTFSLQVKPEIPTRPPRRPTTTRPTATGRPTTISTRSTHVPTSTRVSTSTPPTSTHTWTHKPEPTTFCPHETTAEVTGIPSHTPTDWNGTVTSSGDTWSNHTEAIPPGKPQKNPTKGFYVGICIAALLLLLLVSTVAITRYILMKRKSASLSVVAFRVSKIEALQNAAVVHSRAEDNIYIVEDRP

SEQ ID NO: 189 - DNA, 2097 bp, Homo sapiens
gctcacctccgcctgagcagtggagaaggcggcactctggtggggctgctccaggcatgcagatcccacaggcgccctggccagtcgtctgggcggtgctacaactgggctggcggccaggatggttcttagactccccagacaggccctggaacccccccaccttctccccagccctgctcgtggtgaccgaaggggacaacgccaccttcacctgcagcttctccaacacatcggagagcttcgtgctaaactggtaccgcatgagccccagcaaccagacggacaagctggccgccttccccgaggaccgcagccagcccggccaggactgccgcttccgtgtcacacaactgcccaacgggcgtgacttccacatgagcgtggtcagggcccggcgcaatgacagcggcacctacctctgtggggccatctccctggcccccaaggcgcagatcaaagagagcctgcgggcagagctcagggtgacagagagaagggcagaagtgcccacagcccaccccagcccctcacccaggccagccggccagttccaaaccctggtggttggtgtcgtgggcggcctgctgggcagcctggtgctgctagtctgggtcctggccgtcatctgctcccgggccgcacgagggacaataggagccaggcgcaccggccagcccctgaaggaggacccctcagccgtgcctgtgttctctgtggactatggggagctggatttccagtggcgagagaagaccccggagccccccgtgccctgtgtccctgagcagacggagtatgccaccattgtctttcctagcggaatgggcacctcatcccccgcccgcaggggctcagctgacggccctcggagtgcccagccactgaggcctgaggatggacactgctcttggcccctctgaccggcttccttggccaccagtgttctgcagaccctccaccatgagcccgggtcagcgcatttcctcaggagaagcaggcagggtgcaggccattgcaggccgtccaggggctgagctgcctgggggcgaccggggctccagcctgcacctgcaccaggcacagccccaccacaggactcatgtctcaatgcccacagtgagcccaggcagcaggtgtcaccgtcccctacagggagggccagatgcagtcactgcttcaggtcctgccagcacagagctgcctgcgtccagctccctgaatctctgctgctgctgctgctgctgctgctgctgcctgcggcccggggctgaaggcgccgtggccctgcctgacgccccggagcctcctgcctgaacttgggggctggttggagatggccttggagcagccaaggtgcccctggcagtggcatcccgaaacgccctggacgcagggcccaagactgggcacaggagtgggaggtacatggggctggggactccccaggagttatctgctccctgcaggcctagagaagtttcagggaaggtcagaagagctcctggctgtggtgggcagggcaggaaacccctccacctttacacatgcccaggcagcacctcaggccctttgtggggcagggaagctgaggcagtaagcgggcaggcagagctggaggcctttcaggcccagccagcactctggcctcctgccgccgcattccaccccagcccctcacaccactcgggagagggacatcctacggtcccaaggtcaggagggcagggctggggttgactcaggcccctcccagctgtggccacctgggtgttgggagggcagaagtgcaggcacctagggccccccatgtgcccaccctgggagctctccttggaacccattcctgaaattatttaaaggggttggccgggctcccaccagggcctgggtgggaaggtacaggcgttcccccggggcctagtacccccgccgtggcctatccactcctcacatccacacactgcacccccactcctggggcagggccaccagcatccaggcggccagcaggcacctgagtggctgggacaagggatcccccttccctgtggttctattatattataattataattaaatatgagagcatgctaa

SEQ ID NO: 190 - protein, 288 aa, Homo sapiens
MQIPQAPWPVVWAVLQLGWRPGWFLDSPDRPWNPPTFSPALLVVTEGDNATFTCSFSNTSESFVLNWYRMSPSNQTDKLAAFPEDRSQPGQDCRFRVTQLPNGRDFHMSVVRARRNDSGTYLCGAISLAPKAQIKESLRAELRVTERRAEVPTAHPSPSPRPAGQFQTLVVGVVGGLLGSLVLLVWVLAVICSRAARGTIGARRTGQPLKEDPSAVPVFSVDYGELDFQWREKTPEPPVPCVPEQTEYATIVFPSGMGTSSPARRGSADGPRSAQPLRPEDGHCSWPL

SEQ ID NO: 191 - DNA, 1933 bp, Mus musculus
tgagcagcggggaggaggaagaggagactgctactgaaggcgacactgccaggggctctgggcatgtgggtccggcaggtaccctggtcattcacttgggctgtgctgcagttgagctggcaatcagggtggcttctagaggtccccaatgggccctggaggtccctcaccttctacccagcctggctcacagtgtcagagggagcaaatgccaccttcacctgcagcttgtccaactggtcggaggatcttatgctgaactggaaccgcctgagtcccagcaaccagactgaaaaacaggccgccttctgtaatggtttgagccaacccgtccaggatgcccgcttccagatcatacagctgcccaacaggcatgacttccacatgaacatccttgacacacggcgcaatgacagtggcatctacctctgtggggccatctccctgcaccccaaggcaaaaatcgaggagagccctggagcagagctcgtggtaacagagagaatcctggagacctcaacaagatatcccagcccctcgcccaaaccagaaggccggtttcaaggcatggtcattggtatcatgagtgccctagtgggtatccctgtattgctgctgctggcctgggccctagctgtcttctgctcaacaagtatgtcagaggccagaggagctggaagcaaggacgacactctgaaggaggagccttcagcagcacctgtccctagtgtggcctatgaggagctggacttccagggacgagagaagacaccagagctccctaccgcctgtgtgcacacagaatatgccaccattgtcttcactgaagggctgggtgcctcggccatgggacgtaggggctcagctgatggcctgcagggtcctcggcctccaagacatgaggatggacattgttcttggcctctttgaccagattcttcagccattagcatgctgcagaccctccacagagagcaccggtccgtccctcagtcaagaggagcatgcaggctacagttcagccaaggctcccagggtctgagctagctggagtgacagcccagcgcctgcaccaattccagcacatgcactgttgagtgagagctcacttcaggtttaccacaagctgggagcagcaggcttcccggtttcctattgtcacaaggtgcagagctggggcctaagcctatgtctcctgaatcctactgttgggcacttctagggacttgagacactatagccaatggcctctgtgggttctgtgcctggaaatggagagatctgagtacagcctgctttgaatggccctgtgaggcaaccccaaagcaagggggtccaggtatactatgggcccagcacctaaagccacccttgggagatgatactcaggtgggaaattcgtagactgggggactgaaccaatcccaagatctggaaaagttttgatgaagacttgaaaagctcctagcttcgggggtctgggaagcatgagcacttaccaggcaaaagctccgtgagcgtatctgctgtccttctgcatgcccaggtacctcagtttttttcaacagcaaggaaactagggcaataaagggaaccagcagagctagagccacccacacatccaggggggcacttgactctccctactcctcctaggaaccaaaaggacaaagtccatgttgacagcagggaaggaaagggggatataaccttgacgcaaaccaacactggggtgttagaatctcctcattcactctgtcctggagttgggttctggctctccttcacacctaggactctgaaatgagcaagcacttcagacagtcagggtagcaagagtctagctgtctggtgggcacccaaaatgaccagggcttaagtccctttcctttggtttaagcccgttataattaaatggtaccaaaagctttaa

SEQ ID NO: 192 - DNA, 696 bp, Artificial Sequence
  Description of Artificial Sequence: Synthetic polynucleotide
atggtgagcaagggcgaggcagtgatcaaggagttcatgcggttcaaggtgcacatggagggctccatgaacggccacgagttcgagatcgagggcgagggcgagggccgcccctacgagggcacccagaccgccaagctgaaggtgaccaagggtggccccctgcccttctcctgggacatcctgtcccctcagttcatgtacggctccagggccttcaccaagcaccccgccgacatccccgactactataagcagtccttccccgagggcttcaagtgggagcgcgtgatgaacttcgaggacggcggcgccgtgaccgtgacccaggacacctccctggaggacggcaccctgatctacaaggtgaagctccgcggcaccaacttccctcctgacggccccgtaatgcagaagaagacaatgggctgggaagcgtccaccgagcggttgtaccccgaggacggcgtgctgaagggcgacattaagatggccctgcgcctgaaggacggcggccgctacctggcggacttcaagaccacctacaaggccaagaagcccgtgcagatgcccggcgcctacaacgtcgaccgcaagttggacatcacctcccacaacgaggactacaccgtggtggaacagtacgaacgctccgagggccgccactccaccggcggcatggacgagctgtacaag

SEQ ID NO: 193 - protein, 232 aa, Artificial Sequence
  Description of Artificial Sequence: Synthetic polypeptide
MVSKGEAVIKEFMRFKVHMEGSMNGHEFEIEGEGEGRPYEGTQTAKLKVTKGGPLPFSWDILSPQFMYGSRAFTKHPADIPDYYKQSFPEGFKWERVMNFEDGGAVTVTQDTSLEDGTLIYKVKLRGTNFPPDGPVMQKKTMGWEASTERLYPEDGVLKGDIKMALRLKDGGRYLADFKTTYKAKKPVQMPGAYNVDRKLDITSHNEDYTVVEQYERSEGRHSTGGMDELYK

SEQ ID NO: 194 - DNA, 3861 bp, Artificial Sequence
  Description of Artificial Sequence: Synthetic polynucleotide
ggcctaactggcctcaatattggccattagccatattattcattggttatatagcataaatcaatattggctattggccattgcatacgttgtatctatatcataatatgtacatttatattggctcatgtccaatatgaccgccatgttggcattgattattgactagttattaatagtaatcaattacggggtcattagttcatagcccatatatggagttccgcgttacataacttacggtaaatggcccgcctggctgaccgcccaacgacccccgcccattgacgtcaataatgacgtatgttcccatagtaacgccaatagggactttccattgacgtcaatgggtggagtatttacggtaaactgcccacttggcagtacatcaagtgtatcatatgccaagtccgccccctattgacgtcaatgacggtaaatggcccgcctggcattatgcccagtacatgaccttacgggactttcctacttggcagtacatctacgtattagtcatcgctattaccatggtgatgcggttttggcagtacaccaatgggcgtggatagcggtttgactcacggggatttccaagtctccaccccattgacgtcaatgggagtttgttttggcaccaaaatcaacgggactttccaaaatgtcgtaataaccccgccccgttgacgcaaatgggcggtaggcgtgtacggtgggaggtctatataagcagagctcgtttagtgaaccgtcagatcactagaagctttattgcggtagtttatcacagttaaattgctaacgcagtcagtgggcctcggcggccaagcttggcaatccggtactgttggtaaagccaccatggtcttcacactcgaagatttcgttggggactggcgacagacagccggctacaacctggaccaagtccttgaacagggaggtgtgtccagtttgtttcagaatctcggggtgtccgtaactccgatccaaaggattgtcctgagcggtgaaaatgggctgaagatcgacatccatgtcatcatcccgtatgaaggtctgagcggcgaccaaatgggccagatcgaaaaaatttttaaggtggtgtaccctgtggatgatcatcactttaaggtgatcctgcactatggcacactggtaatcgacggggttacgccgaacatgatcgactatttcggacggccgtatgaaggcatcgccgtgttcgacggcaaaaagatcactgtaacagggaccctgtggaacggcaacaaaattatcgacgagcgcctgatcaaccccgacggctccctgctgttccgagtaaccatcaacggagtgaccggctggcggctgtgcgaacgcattctggcgtaattctagagtcggggcggccggccgcttcgagcagacatgataagatacattgatgagtttggacaaaccacaactagaatgcagtgaaaaaaatgctttatttgtgaaatttgtgatgctattgctttatttgtaaccattataagctgcaataaacaagttaacaacaacaattgcattcattttatgtttcaggttcagggggaggtgtgggaggttttttaaagcaagtaaaacctctacaaatgtggtaaaatcgataaggatccgtcgaccgatgcccttgagagccttcaacccagtcagctccttccggtgggcgcggggcatgactatcgtcgccgcacttatgactgtcttctttatcatgcaactcgtaggacaggtgccggcagcgctcttccgcttcctcgctcactgactcgctgcgctcggtcgttcggctgcggcgagcggtatcagctcactcaaaggcggtaatacggttatccacagaatcaggggataacgcaggaaagaacatgtgagcaaaaggccagcaaaaggccaggaaccgtaaaaaggccgcgttgctggcgtttttccataggctccgcccccctgacgagcatcacaaaaatcgacgctcaagtcagaggtggcgaaacccgacaggactataaagataccaggcgtttccccctggaagctccctcgtgcgctctcctgttccgaccctgccgcttaccggatacctgtccgcctttctcccttcgggaagcgtggcgctttctcatagctcacgctgtaggtatctcagttcggtgtaggtcgttcgctccaagctgggctgtgtgcacgaaccccccgttcagcccgaccgctgcgccttatccggtaactatcgtcttgagtccaacccggtaagacacgacttatcgccactggcagcagccactggtaacaggattagcagagcgaggtatgtaggcggtgctacagagttcttgaagtggtggcctaactacggctacactagaagaacagtatttggtatctgcgctctgctgaagccagttaccttcggaaaaagagttggtagctcttgatccggcaaacaaaccaccgctggtagcggtggtttttttgtttgcaagcagcagattacgcgcagaaaaaaaggatctcaagaagatcctttgatcttttctacggggtctgacgctcagtggaacgaaaactcacgttaagggattttggtcatgagattatcaaaaaggatcttcacctagatccttttaaattaaaaatgaagttttaaatcaatctaaagtatatatgagtaaacttggtctgacagcggccgcaaatgctaaaccactgcagtggttaccagtgcttgatcagtgaggcaccgatctcagcgatctgcctatttcgttcgtccatagtggcctgactccccgtcgtgtagatcactacgattcgtgagggcttaccatcaggccccagcgcagcaatgatgccgcgagagccgcgttcaccggcccccgatttgtcagcaatgaaccagccagcagggagggccgagcgaagaagtggtcctgctactttgtccgcctccatccagtctatgagctgctgtcgtgatgctagagtaagaagttcgccagtgagtagtttccgaagagttgtggccattgctactggcatcgtggtatcacgctcgtcgttcggtatggcttcgttcaactctggttcccagcggtcaagccgggtcacatgatcacccatattatgaagaaatgcagtcagctccttagggcctccgatcgttgtcagaagtaagttggccgcggtgttgtcgctcatggtaatggcagcactacacaattctcttaccgtcatgccatccgtaagatgcttttccgtgaccggcgagtactcaaccaagtcgttttgtgagtagtgtatacggcgaccaagctgctcttgcccggcgtctatacgggacaacaccgcgccacatagcagtactttgaaagtgctcatcatcgggaatcgttcttcggggcggaaagactcaaggatcttgccgctattgagatccagttcgatatagcccactcttgcacccagttgatcttcagcatcttttactttcaccagcgtttcggggtgtgcaaaaacaggcaagcaaaatgccgcaaagaagggaatgagtgcgacacgaaaatgttggatgctcatactcgtcctttttcaatattattgaagcatttatcagggttactagtacgtctctcaaggataagtaagtaatattaaggtacgggaggtattggacaggccgcaataaaatatctttattttcattacatctgtgtgttggttttttgtgtgaatcgatagtactaacatacgctctccatcaaaacaaaacgaaacaaaacaaactagcaaaataggctgtccccagtgcaagtgcaggtgccagaacatttctct

SEQ ID NO: 195 - protein, 171 aa, Artificial Sequence
  Description of Artificial Sequence: Synthetic polypeptide
MVFTLEDFVGDWRQTAGYNLDQVLEQGGVSSLFQNLGVSVTPIQRIVLSGENGLKIDIHVIIPYEGLSGDQMGQIEKIFKVVYPVDDHHFKVILHYGTLVIDGVTPNMIDYFGRPYEGIAVFDGKKITVTGTLWNGNKIIDERLINPDGSLLFRVTINGVTGWRLCERILA

SEQ ID NO: 196 - DNA, 2590 bp, Homo sapiens
ctgcttactgcaactcgctccggccgctgggcgtagctgcgactcggcggagtcccggcggcgcgtccttgttctaacccggcgcgccatgaccgtcgcgcggccgagcgtgcccgcggcgctgcccctcctcggggagctgccccggctgctgctgctggtgctgttgtgcctgccggccgtgtggggtgactgtggccttcccccagatgtacctaatgcccagccagctttggaaggccgtacaagttttcccgaggatactgtaataacgtacaaatgtgaagaaagctttgtgaaaattcctggcgagaaggactcagtgatctgccttaagggcagtcaatggtcagatattgaagagttctgcaatcgtagctgcgaggtgccaacaaggctaaattctgcatccctcaaacagccttatatcactcagaattattttccagtcggtactgttgtggaatatgagtgccgtccaggttacagaagagaaccttctctatcaccaaaactaacttgccttcagaatttaaaatggtccacagcagtcgaattttgtaaaaagaaatcatgccctaatccgggagaaatacgaaatggtcagattgatgtaccaggtggcatattatttggtgcaaccatctccttctcatgtaacacagggtacaaattatttggctcgacttctagtttttgtcttatttcaggcagctctgtccagtggagtgacccgttgccagagtgcagagaaatttattgtccagcaccaccacaaattgacaatggaataattcaaggggaacgtgaccattatggatatagacagtctgtaacgtatgcatgtaataaaggattcaccatgattggagagcactctatttattgtactgtgaataatgatgaaggagagtggagtggcccaccacctgaatgcagaggaaaatctctaacttccaaggtcccaccaacagttcagaaacctaccacagtaaatgttccaactacagaagtctcaccaacttctcagaaaaccaccacaaaaaccaccacaccaaatgctcaagcaacacggagtacacctgtttccaggacaaccaagcattttcatgaaacaaccccaaataaaggaagtggaaccacttcaggtactacccgtcttctatctgggcacacgtgtttcacgttgacaggtttgcttgggacgctagtaaccatgggcttgctgacttagccaaagaagagttaagaagaaaatacacacaagtatacagactgttcctagtttcttagacttatctgcatattggataaaataaatgcaattgtgctcttcatttaggatgctttcattgtctttaagatgtgttaggaatgtcaacagagcaaggagaaaaaaggcagtcctggaatcacattcttagcacacctacacctcttgaaaatagaacaacttgcagaattgagagtgattcctttcctaaaagtgtaagaaagcatagagatttgttcgtatttagaatgggatcacgaggaaaagagaaggaaagtgatttttttccacaagatctgtaatgttatttccacttataaaggaaataaaaaatgaaaaacattatttggatatcaaaagcaaataaaaacccaattcagtctcttctaagcaaaattgctaaagagagatgaaccacattataaagtaatctttggctgtaaggcattttcatctttccttcgggttggcaaaatattttaaaggtaaaacatgctggtgaaccaggggtgttgatggtgataagggaggaatatagaatgaaagactgaatcttcctttgttgcacaaatagagtttggaaaaagcctgtgaaaggtgtcttctttgacttaatgtctttaaaagtatccagagatactacaatattaacataagaaaagattatatattatttctgaatcgagatgtccatagtcaaatttgtaaatcttattcttttgtaatatttatttatatttatttatgacagtgaacattctgattttacatgtaaaacaagaaaagttgaagaagatatgtgaagaaaaatgtatttttcctaaatagaaataaatgatcccattttttggtatcatgtagtatgtgaaatttattcttaaacgtgactactttatttctaaataagaaattccctacctgcttcctacaagcagttcagaatgccatgccttggttgtcctagtgtgaataattttcagctactttaaaattatattgtactttctcaagcatgtcatatcctttcctattagagtatctatattacttgttactgatttacctgaaggcaatctgattaatttctaggtttttaccatattcttgtcatcttgccaattacattttaagtgttagactagactaagatgtactagttgtatagaatataactagatttattatggcaatgtttattttgtcattttgcttcatctgttttgttgttgaagtactttaaatttcatacgttcatggcatttcactgtaaagactttaatgtgtatttcttaaaataaaactttttttcctccttaa

SEQ ID NO: 197 - protein, 381 aa, Homo sapiens
MTVARPSVPAALPLLGELPRLLLLVLLCLPAVWGDCGLPPDVPNAQPALEGRTSFPEDTVITYKCEESFVKIPGEKDSVICLKGSQWSDIEEFCNRSCEVPTRLNSASLKQPYITQNYFPVGTVVEYECRPGYRREPSLSPKLTCLQNLKWSTAVEFCKKKSCPNPGEIRNGQIDVPGGILFGATISFSCNTGYKLFGSTSSFCLISGSSVQWSDPLPECREIYCPAPPQIDNGIIQGERDHYGYRQSVTYACNKGFTMIGEHSIYCTVNNDEGEWSGPPPECRGKSLTSKVPPTVQKPTTVNVPTTEVSPTSQKTTTKTTTPNAQATRSTPVSRTTKHFHETTPNKGSGTTSGTTRLLSGHTCFTLTGLLGTLVTMGLLT

SEQ ID NO: 198 - protein, 128 aa, Homo sapiens
MGIQGGSVLFGLLLVLAVFCHSGHSLQCYNCPNPTADCKTAVNCSSDFDACLITKAGLQVYNKCWKFEHCNFNDVTTRLRENELTYYCCKKDLCNFNEQLENGGTSLSEKTVLLLVTPFLAAAWSLHP

SEQ ID NO: 199 - DNA, 1936 bp, Homo sapiens
agaaccccgcggggtctgagcagcccagcgtgcccattccagcgcccgcgtccccgcagcatgccgcgcccccgcctgctggccgcgctgtgcggcgcgctgctctgcgcccccagcctcctcgtcgccctggatatctgttccaaaaacccctgccacaacggtggtttatgcgaggagatttcccaagaagtgcgaggagatgtcttcccctcgtacacctgcacgtgccttaagggctacgcgggcaaccactgtgagacgaaatgtgtcgagccactgggcctggagaatgggaacattgccaactcacagatcgccgcctcgtctgtgcgtgtgaccttcttgggtttgcagcattgggtcccggagctggcccgcctgaaccgcgcaggcatggtcaatgcctggacacccagcagcaatgacgataacccctggatccaggtgaacctgctgcggaggatgtgggtaacaggtgtggtgacgcagggtgccagccgcttggccagtcatgagtacctgaaggccttcaaggtggcctacagccttaatggacacgaattcgatttcatccatgatgttaataaaaaacacaaggagtttgtgggtaactggaacaaaaacgcggtgcatgtcaacctgtttgagacccctgtggaggctcagtacgtgagattgtaccccacgagctgccacacggcctgcactctgcgctttgagctactgggctgtgagctgaacggatgcgccaatcccctgggcctgaagaataacagcatccctgacaagcagatcacggcctccagcagctacaagacctggggcttgcatctcttcagctggaacccctcctatgcacggctggacaagcagggcaacttcaacgcctgggttgcggggagctacggtaacgatcagtggctgcaggtggacctgggctcctcgaaggaggtgacaggcatcatcacccagggggcccgtaactttggctctgtccagtttgtggcatcctacaaggttgcctacagtaatgacagtgcgaactggactgagtaccaggaccccaggactggcagcagtaagatcttccctggcaactgggacaaccactcccacaagaagaacttgtttgagacgcccatcctggctcgctatgtgcgcatcctgcctgtagcctggcacaaccgcatcgccctgcgcctggagctgctgggctgttagtggccacctgccacccccaggtcttcctgctttccatgggcccgctgcctcttggcttctcagcccctttaaatcaccatagggctggggactggggaaggggagggtgttcagaggcagcaccaccacacagtcacccctccctccctctttcccaccctccacctctcacgggccctgccccagcccctaagccccgtcccctaacccccagtcctcactgtcctgttttcttaggcactgagggatctgagtaggtctgggatggacaggaaagggcaaagtagggcgtgtggtttccctgcccctgtccggaccgccgatcccaggtgcgtgtgtctctgtctctcctagcccctctctcacacatcacattcccatggtggcctcaagaaaggcccggaagcgccaggctggagataacagcctcttgcccgtcggccctgcgtcggccctggggtaccatgtggccacaactgctgtggccccctgtccccaagacacttccccttgtctccctggttgcctctcttgccccttgtcctgaagcccagcgacacagaagggggtggggcgggtctatggggagaaagggagcgaggtcagaggagggcatgggttggcagggtgggcgtttggggccctctatgctggcttttcaccccagaggacacaggcagcttccaaaatatatttatcttcttcacgggaa

SEQ ID NO: 200 - protein, 387 aa, Homo sapiens
MPRPRLLAALCGALLCAPSLLVALDICSKNPCHNGGLCEEISQEVRGDVFPSYTCTCLKGYAGNHCETKCVEPLGLENGNIANSQIAASSVRVTFLGLQHWVPELARLNRAGMVNAWTPSSNDDNPWIQVNLLRRMWVTGVVTQGASRLASHEYLKAFKVAYSLNGHEFDFIHDVNKKHKEFVGNWNKNAVHVNLFETPVEAQYVRLYPTSCHTACTLRFELLGCELNGCANPLGLKNNSIPDKQITASSSYKTWGLHLFSWNPSYARLDKQGNFNAWVAGSYGNDQWLQVDLGSSKEVTGIITQGARNFGSVQFVASYKVAYSNDSANWTEYQDPRTGSSKIFPGNWDNHSHKKNLFETPILARYVRILPVAWHNRIALRLELLGC

SEQ ID NO: 201 - DNA, 2221 bp, Homo sapiens
gcattgcggcttggttttctcacccagtgcatgtggcaggagcggtgagatcactgcctcacggcgatcctggactgacggtcacgactgcctaccctctaaccctgttctgagctgccccttgcccacacaccccaaacctgtgtgcaggatccgcctccatggagctacagcctcctgaagcctcgatcgccgtcgtgtcgattccgcgccagttgcctggctcacattcggaggctggtgtccagggtctcagcgcgggggacgactcagagttggggtctcactgtgttgcccagactggtctcgaactcttggcctcaggtgatcctcttccctcagcttcccagaatgccgagatgatagagacggggtctgactgtgttacccaggctggtcttcaactcttggcctcaagtgatcctcctgccttagcttccaagaatgctgaggttacaggcaccatgagccaggacaccgaggtggatatgaaggaggtggagctgaatgagttagagcccgagaagcagccgatgaacgcggcgtctggggcggccatgtccctggcgggagccgagaagaatggtctggtgaagatcaaggtggcggaagacgaggcggaggcggcagccgcggctaagttcacgggcctgtccaaggaggagctgctgaaggtggcaggcagccccggctgggtacgcacccgctgggcactgctgctgctcttctggctcggctggctcggcatgcttgctggtgccgtggtcataatcgtgcgagcgccgcgttgtcgcgagctaccggcgcagaagtggtggcacacgggcgccctctaccgcatcggcgaccttcaggccttccagggccacggcgcgggcaacctggcgggtctgaaggggcgtctcgattacctgagctctctgaaggtgaagggccttgtgctgggtccaattcacaagaaccagaaggatgatgtcgctcagactgacttgctgcagatcgaccccaattttggctccaaggaagattttgacagtctcttgcaatcggctaaaaaaaagagcatccgtgtcattctggaccttactcccaactaccggggtgagaactcgtggttctccactcaggttgacactgtggccaccaaggtgaaggatgctctggagttttggctgcaagctggcgtggatgggttccaggttcgggacatagagaatctgaaggatgcatcctcattcttggctgagtggcaaaatatcaccaagggcttcagtgaagacaggctcttgattgcggggactaactcctccgaccttcagcagatcctgagcctactcgaatccaacaaagacttgctgttgactagctcatacctgtctgattctggttctactggggagcatacaaaatccctagtcacacagtatttgaatgccactggcaatcgctggtgcagctggagtttgtctcaggcaaggctcctgacttccttcttgccggctcaacttctccgactctaccagctgatgctcttcaccctgccagggacccctgttttcagctacggggatgagattggcctggatgcagctgcccttcctggacagcctatggaggctccagtcatgctgtgggatgagtccagcttccctgacatcccaggggctgtaagtgccaacatgactgtgaagggccagagtgaagaccctggctccctcctttccttgttccggcggctgagtgaccagcggagtaaggagcgctccctactgcatggggacttccacgcgttctccgctgggcctggactcttctcctatatccgccactgggaccagaatgagcgttttctggtagtgcttaactttggggatgtgggcctctcggctggactgcaggcctccgacctgcctgccagcgccagcctgccagccaaggctgacctcctgctcagcacccagccaggccgtgaggagggctcccctcttgagctggaacgcctgaaactggagcctcacgaagggctgctgctccgcttcccctacgcggcctgacttcagcctgacatggacccactacccttctcctttccttcccaggccctttggcttctgatttttctcttttttaaaaacaaacaaacaaactgttgcagattatgagtgaacccccaaatagggtgttttctgccttcaaataaaagtcacccctgcatggtgaa

SEQ ID NO: 202 - protein, 630 aa, Homo sapiens
MELQPPEASIAVVSIPRQLPGSHSEAGVQGLSAGDDSELGSHCVAQTGLELLASGDPLPSASQNAEMIETGSDCVTQAGLQLLASSDPPALASKNAEVTGTMSQDTEVDMKEVELNELEPEKQPMNAASGAAMSLAGAEKNGLVKIKVAEDEAEAAAAAKFTGLSKEELLKVAGSPGWVRTRWALLLLFWLGWLGMLAGAVVIIVRAPRCRELPAQKWWHTGALYRIGDLQAFQGHGAGNLAGLKGRLDYLSSLKVKGLVLGPIHKNQKDDVAQTDLLQIDPNFGSKEDFDSLLQSAKKKSIRVILDLTPNYRGENSWFSTQVDTVATKVKDALEFWLQAGVDGFQVRDIENLKDASSFLAEWQNITKGFSEDRLLIAGTNSSDLQQILSLLESNKDLLLTSSYLSDSGSTGEHTKSLVTQYLNATGNRWCSWSLSQARLLTSFLPAQLLRLYQLMLFTLPGTPVFSYGDEIGLDAAALPGQPMEAPVMLWDESSFPDIPGAVSANMTVKGQSEDPGSLLSLFRRLSDQRSKERSLLHGDFHAFSAGPGLFSYIRHWDQNERFLVVLNFGDVGLSAGLQASDLPASASLPAKADLLLSTQPGREEGSPLELERLKLEPHEGLLLRFPYAA

SEQ ID NO: 203 - DNA, 2886 bp, Homo sapiens
atcgctgggggacagcctgcaggcttcaggaggggacacaagcatggagcggctttggggtctattccagagagcgcaacaactgtccccaagatcctctcagaccgtctaccagcgtgtggaaggcccccggaaagggcacctggaggaggaagaggaagacggggaggagggggcggagacattggcccacttctgccccatggagctgaggggccctgagcccctgggctctagacccaggcagccaaacctcattccctgggcggcagcaggacggagggctgccccctacctggtcctgacggccctgctgatcttcactggggccttcctactgggctacgtcgccttccgagggtcctgccaggcgtgcggagactctgtgttggtggtcagtgaggatgtcaactatgagcctgacctggatttccaccagggcagactctactggagcgacctccaggccatgttcctgcagttcctgggggaggggcgcctggaggacaccatcaggcaaaccagccttcgggaacgggtggcaggctcggccgggatggccgctctgactcaggacattcgcgcggcgctctcccgccagaagctggaccacgtgtggaccgacacgcactacgtggggctgcaattcccggatccggctcaccccaacaccctgcactgggtcgatgaggccgggaaggtcggagagcagctgccgctggaggaccctgacgtctactgcccctacagcgccatcggcaacgtcacgggagagctggtgtacgcccactacgggcggcccgaagacctgcaggacctgcgggccaggggcgtggatccagtgggccgcctgctgctggtgcgcgtgggggtgatcagcttcgcccagaaggtgaccaatgctcaggacttcggggctcaaggagtgctcatatacccagagccagcggacttctcccaggacccacccaagccaagcctgtccagccagcaggcagtgtatggacatgtgcacctgggaactggagacccctacacacctggcttcccttccttcaatcaaacccagttccctccagttgcatcatcaggccttcccagcatcccagcccagcccatcagtgcagacattgcctcccgcctgctgaggaagctcaaaggccctgtggccccccaagaatggcaggggagcctcctaggctccccttatcacctgggccccgggccacgactgcggctagtggtcaacaatcacaggacctccacccccatcaacaacatcttcggctgcatcgaaggccgctcagagccagatcactacgttgtcatcggggcccagagggatgcatggggcccaggagcagctaaatccgctgtggggacggctatactcctggagctggtgcggaccttttcctccatggtgagcaacggcttccggccccgcagaagtctcctcttcatcagctgggacggtggtgactttggaagcgtgggctccacggagtggctagagggctacctcagcgtgctgcacctcaaagccgtagtgtacgtgagcctggacaacgcagtgctgggggatgacaagtttcatgccaagaccagcccccttctgacaagtctcattgagagtgtcctgaagcaggtggattctcccaaccacagtgggcagactctctatgaacaggtggtgttcaccaatcccagctgggatgctgaggtgatccggcccctacccatggacagcagtgcctattccttcacggcctttgtgggagtccctgccgtcgagttctcctttatggaggacgaccaggcctacccattcctgcacacaaaggaggacacttatgagaacctgcataaggtgctgcaaggccgcctgcccgccgtggcccaggccgtggcccagctcgcagggcagctcctcatccggctcagccacgatcgcctgctgcccctcgacttcggccgctacggggacgtcgtcctcaggcacatcgggaacctcaacgagttctctggggacctcaaggcccgcgggctgaccctgcagtgggtgtactcggcgcggggggactacatccgggcggcggaaaagctgcggcaggagatctacagctcggaggagagagacgagcgactgacacgcatgtacaacgtgcgcataatgcgggtggagttctacttcctttcccagtacgtgtcgccagccgactccccgttccgccacatcttcatgggccgtggagaccacacgctgggcgccctgctggaccacctgcggctgctgcgctccaacagctccgggacccccggggccacctcctccactggcttccaggagagccgtttccggcgtcagctagccctgctcacctggacgctgcaaggggcagccaatgcgcttagcggggatgtctggaacattgataacaacttctgaggccctggggatcctcacatccccgtcccccagtcaagagctcctctgctcctcgcttgaatgattcagggtcagggaggtggctcagagtccacctctcattgctgatcaatttctcattacccctacacatctctccacggagcccagaccccagcacagatatccacacaccccagccctgcagtgtagctgaccctaatgtgacggtcatactgtcggttaatcagagagtagcatcccttcaatcacagccccttcccctttctggggtcctccatacctagagaccactctgggaggtttgctaggccctgggacctggccagctctgttagtgggagagatcgctggcaccatagccttatggccaacaggtggtctgtggtgaaaggggcgtggagtttcaatatcaataaaccacctgatatcaataa

SEQ ID NO: 204 - protein, 801 aa, Homo sapiens
MERLWGLFQRAQQLSPRSSQTVYQRVEGPRKGHLEEEEEDGEEGAETLAHFCPMELRGPEPLGSRPRQPNLIPWAAAGRRAAPYLVLTALLIFTGAFLLGYVAFRGSCQACGDSVLVVSEDVNYEPDLDFHQGRLYWSDLQAMFLQFLGEGRLEDTIRQTSLRERVAGSAGMAALTQDIRAALSRQKLDHVWTDTHYVGLQFPDPAHPNTLHWVDEAGKVGEQLPLEDPDVYCPYSAIGNVTGELVYAHYGRPEDLQDLRARGVDPVGRLLLVRVGVISFAQKVTNAQDFGAQGVLIYPEPADFSQDPPKPSLSSQQAVYGHVHLGTGDPYTPGFPSFNQTQFPPVASSGLPSIPAQPISADIASRLLRKLKGPVAPQEWQGSLLGSPYHLGPGPRLRLVVNNHRTSTPINNIFGCIEGRSEPDHYVVIGAQRDAWGPGAAKSAVGTAILLELVRTFSSMVSNGFRPRRSLLFISWDGGDFGSVGSTEWLEGYLSVLHLKAVVYVSLDNAVLGDDKFHAKTSPLLTSLIESVLKQVDSPNHSGQTLYEQVVFTNPSWDAEVIRPLPMDSSAYSFTAFVGVPAVEFSFMEDDQAYPFLHTKEDTYENLHKVLQGRLPAVAQAVAQLAGQLLIRLSHDRLLPLDFGRYGDVVLRHIGNLNEFSGDLKARGLTLQWVYSARGDYIRAAEKLRQEIYSSEERDERLTRMYNVRIMRVEFYFLSQYVSPADSPFRHIFMGRGDHTLGALLDHLRLLRSNSSGTPGATSSTGFQESRFRRQLALLTWTLQGAANALSGDVWNIDNNF

SEQ ID NO: 205 - DNA, 11158 bp, Homo sapiens
gttgccggcccctgaagtggagcgagagggaggtgcttcgccgtttctcctgccaggggaggtcccggcttcccgtggaggctccggaccaagccccttcagcttctccctccggatcgatgtgctgctgttaacccgtgaggaggcggcggcggcggcagcggcagcggaagatggtgttgctgagagtgttaattctgctcctctcctgggcggcggggatgggaggtcagtatgggaatcctttaaataaatatatcagacattatgaaggattatcttacaatgtggattcattacaccaaaaacaccagcgtgccaaaagagcagtctcacatgaagaccaatttttacgtctagatttccatgcccatggaagacatttcaacctacgaatgaagagggacacttcccttttcagtgatgaatttaaagtagaaacatcaaataaagtacttgattatgatacctctcatatttacactggacatatttatggtgaagaaggaagttttagccatgggtctgttattgatggaagatttgaaggattcatccagactcgtggtggcacattttatgttgagccagcagagagatatattaaagaccgaactctgccatttcactctgtcatttatcatgaagatgatattaactatccccataaatacggtcctcaggggggctgtgcagatcattcagtatttgaaagaatgaggaaataccagatgactggtgtagaggaagtaacacagatacctcaagaagaacatgctgctaatggtccagaacttctgaggaaaaaacgtacaacttcagctgaaaaaaatacttgtcagctttatattcagactgatcatttgttctttaaatattacggaacacgagaagctgtgattgcccagatatccagtcatgttaaagcgattgatacaatttaccagaccacagacttctccggaatccgtaacatcagtttcatggtgaaacgcataagaatcaatacaactgctgatgagaaggaccctacaaatcctttccgtttcccaaatattggtgtggagaagtttctggaattgaattctgagcagaatcatgatgactactgtttggcctatgtcttcacagaccgagattttgatgatggcgtacttggtctggcttgggttggagcaccttcaggaagctctggaggaatatgtgaaaaaagtaaactctattcagatggtaagaagaagtccttaaacactggaattattactgttcagaactatgggtctcatgtacctcccaaagtctctcacattacttttgctcacgaagttggacataactttggatccccacatgattctggaacagagtgcacaccaggagaatctaagaatttgggtcaaaaagaaaatggcaattacatcatgtatgcaagagcaacatctggggacaaacttaacaacaataaattctcactctgtagtattagaaatataagccaagttcttgagaagaagagaaacaactgttttgttgaatctggccaacctatttgtggaaatggaatggtagaacaaggtgaagaatgtgattgtggctatagtgaccagtgtaaagatgaatgctgcttcgatgcaaatcaaccagagggaagaaaatgcaaactgaaacctgggaaacagtgcagtccaagtcaaggtccttgttgtacagcacagtgtgcattcaagtcaaagtctgagaagtgtcgggatgattcagactgtgcaagggaaggaatatgtaatggcttcacagctctctgcccagcatctgaccctaaaccaaacttcacagactgtaataggcatacacaagtgtgcattaatgggcaatgtgcaggttctatctgtgagaaatatggcttagaggagtgtacgtgtgccagttctgatggcaaagatgataaagaattatgccatgtatgctgtatgaagaaaatggacccatcaacttgtgccagtacagggtctgtgcagtggagtaggcacttcagtggtcgaaccatcaccctgcaacctggatccccttgcaacgattttagaggttactgtgatgttttcatgcggtgcagattagtagatgctgatggtcctctagctaggcttaaaaaagcaatttttagtccagagctctatgaaaacattgctgaatggattgtggctcattggtgggcagtattacttatgggaattgctctgatcatgctaatggctggatttattaagatatgcagtgttcatactccaagtagtaatccaaagttgcctcctcctaaaccacttccaggcactttaaagaggaggagacctccacagcccattcagcaaccccagcgtcagcggccccgagagagttatcaaatgggacacatgagacgctaactgcagcttttgccttggttcttcctagtgcctacaatgggaaaacttcactccaaagagaaacctattaagtcatcatctccaaactaaaccctcacaagtaacagttgaagaaaaaatggcaagagatcatatcctcagaccaggtggaattacttaaattttaaagcctgaaaattccaatttgggggtgggaggtggaaaaggaacccaattttcttatgaacagatatttttaacttaatggcacaaagtcttagaatattattatgtgccccgtgttccctgttcttcgttgctgcattttcttcacttgcaggcaaacttggctctcaataaacttttaccacaaattgaaataaatatatttttttcaactgccaatcaaggctaggaggctcgaccacctcaacattggagacatcacttgccaatgtacataccttgttatatgcagacatgtatttcttacgtacactgtacttctgtgtgcaattgtaaacagaaattgcaatatggatgtttctttgtattataaaatttttccgctcttaattaaaaattactgtttaattgacatactcaggataacagagaatggtggtattcagtggtccaggattctgtaatgctttacacaggcagttttgaaatgaaaatcaatttacctttctgttacgatggagttggttttgatactcattttttctttatcacatggctgctacgggcacaagtgactatactgaagaacacagttaagtgttgtgcaaactggacatagcagcacatactacttcagagttcatgatgtagatgtctggtttctgcttacgtcttttaaactttctaattcaattccatttttcaattaataggtgaaattttattcatgctttgatagaaattatgtcaatgaaatgattctttttatttgtagcctacttatttgtgtttttcatatatctgaaatatgctaattatgttttctgtctgatatggaaaagaaaagctgtgtctttatcaaaatatttaaacggttttttcagcatatcatcactgatcattggtaaccactaaagatgagtaatttgcttaagtagtagttaaaattgtagataggccttctgacattttttttcctaaaatttttaacagcattgaaggtgaaacagcacaatgtcccattccaaatttatttttgaaacagatgtaaataattggcattttaaagagaaagcaaaaacatttaatgtattaacaggcttattgctatgcaggaaatagaaggggcattacaaaaattgaagcttgtgacatatttattgcttctgttttccaactacatcacttcaactagaagtaaagctatgattttcctgacttcacataggaggcaaatttagagaaagttgtaaagatttctatgttttgggtttttttttttcctttttttttttaagagtataaggtttacacaatcattctcataatgtgacgcaagccagcaaggccaaaaatgctagagaaaataacgggatctcttccttgtaaacttgtacagtatgtggtgactttttcaaaatacagctttttgtacatgatttagagacaaattttgtacatgaaaccccagatagactataaataattctaaacaaacaagtaggtagatatgtatgtaattgcttttaaatcatttaaatgcctttgtttttggactgtgcaaaggttggaagtgggtttgcatttctaaaatggtgacttttattctgcaagagttcttagtaacttcttgagtgtggtagactttggaacatgtaaattttttgcttgtaatgttatcctgtggtaggattttggcaggtacacacactgccctattttattttgagtctaagttaaatgttttctgaaaagagatacatgcactgaactctttccactgcgaatcaagatgtggtaatataaaaggatcaagacaaatgagatctaatactactgtcagttttaatgtccactgtgttttatacagtatctttttttgttcactttggaaatttttactaaaaattgcaaaaaataaagtattgtgcaaagatgtaaggttttttgaaacttgaaatgcattaataaatagacgattaaatcaacttgaaggttctatactctttgaactctgagaactatcacaagaagcttcccacaaggcagtgttttcttacagttgtctcttcctacaaaagtatagattatctttattcttaatactttggaatccatgtagaaaatttccagttagatactctgcgtacacacaataaacctttttaaaacacccaactaatctcaactgcattacattgtttctaatcaatattcagtgcttgtcttggtggaagaggtgagtcattttgaaaacttatggtcttgtttttatgtgtttttcaaagttttgaatgctaagtacctcatttattttaaaaagcctagtttaatgataagtttgtttaaaattttgagccatcatttttctcttcatagcaaataaggagagaattgacatttcagtgttacctagaaaaggaattgtaagcccagaataattccctgcatgaggtaatctgcttcaaattctttttttagtcaaggttagctataagtaatacttgttaaatgagtaaatatgtaatactttgtgaattactttgttaatttaggagcatcaaatgtatattatgtttagttatttatgaaactctcaatattgattgatttgggtaattataaattagttatttttacttgtaattgaatgcttaaattctgtttacagtccgtcctctctccctccatccctccctccccagttttataaattcaggtaccaattcacaaacaaaatcagaaataaaataaatttattgactgcttctggatttagcattccctgtagtgtcaagcaatgtcatgcagtttggggaagcatttatttaaggaaatgacaactttctctgatcagtcttgttttgtgaggtgtcttcaacactttatgctttgggtacttcgtgtttgtcacagtcttaggatagtgaaatctgatttgtccaagcggagcaaactactcgaccctcagtccttgtatttgtccctgtagtaagacctaattattattatttcttaaagatgggattggtgtccttggcaactatgaaatttcggggcttgtgcatgagaaggcatttcttattaagtatttctaattgaaggtatcagagtgtcaagcattacaaacctggacagttcacctggaggagtacaagaagagatattcattatccatatttaaagggtcaaggtttcccaaaaccagggtgcaagccagatgtagttttaaagcagctgccagggacagttcatctttagagaagtcactaaagttgtaagaaattttagtttccccaaaaccactttcaacttcttagaaactagaaagacaattggtttgccccacagaggacaacttcagtttcagcatctctcatgttgtgttcttgattaaaaacaacttccatttgatatacttttccgtttattaccagtttagttttttcactattgtttctgtattcaactctttatatgattaggatagaaatttagcccttctgttttatattactatattgtttgtgtgtcttagatatatacatgtatgtactattttcagtagaaattcatgtattttataattggtaagttcttcagagcatctcttctataaaaagcaacaggatgctaggtaaaacggagcattgagcaaaatactgattagtttttgctttttcctgaaatctacactaaagtgatagggtgtggggtaatccaacaaggacaaggtgaattgaacaagaacgaaatctggaagcagatgaaggagtactattgattgggcagacccagggaagtcaaatcctaaaccagcagtgggaacacaacagaatggtgtagtttgcactggtaagatttgggtacctggcagggctgggtgcggtggctcacacctgtaatcccagcactttgggaggccaaggcgggtggatcacttgaggtcaggagttcgagaccaccctggccaacatggtgaaaccccgtctctactaaaaatacagctgggcgtggtggcacatgcttgtaatcccagctactcgggaggcagaggcaggagatttgcttgaacccgggaggcagaggcaggagatttgcttgaacccaggaggcagaggctgcagtgagccgcgattgcgccattgcactccagcctgggtgacagagcgagactctgtctcaaaaaaaaaaaaaaaaaaaaaaaaaaaaaaaaaaaaaaaaaaaaaaaatttgagtacctggcctttgttactttttttctatgtgtgtgacaaaaacataatatgcacacttttgtaacccacctttctcatttaatggtacattgataatgtatatcacattaactactctaaatatttctgtggatgtatgtttttttttttcttaaccaatttcccattgtttggacatgtaggttccacattgtttattattttaaacaattctaaagaattttaaacaattcttaggaaaatcctcagcctaataatgaaattaattcctaaaagtggaattgttggggtaaaggttttttgagggacattgataaaaattatggtactgtctcccagatagatgtaccaagttatactaccacgatttaatatatatatatatatatattaaatcagagtcccatccttagaaatccacatatatgcagccacatgaatgtattagaaacaataatagaagactcatgcttaattcagttgattagctttagacataattcaaatgcaagtcaaattgagtgccctaattgtggtctcttaagtaccatttttcttcaagggaaccagactcctttggataaatcactaattccacctgtaagaaagaaatgtacaagaagaacctaggaaacattgttttgtaccagatcagaaagattcaggaggcaccttagaagttaccactggccaaggctgagataactttagcatcagcaaggataatatctgcaagagattgaaactcatagtattgtatttaactctgtgagttaatgatggtagtggacagaattatagttacctttgggatacgcttttaaagaaattccaggtaataagagaaatgatagaattaggatatcaccattttacccccccaacaatttatggatctagacaataatcgccagtgactgctaacctcacaaagtgagagcaatcagattttgtgcctcctaatggaagtacatataccacctatgaagcagttctgccaaaagtcacatctcatcatgatgaagcctcctgatctaactaccccttcattagaaatacaggggacagagggacaaataatatacaagggactcaatcagcaaaatccagactctggaaaactacaagacatatggtcctgcttcaacaacagaaatgcaaagagaaaagacaacgatgggttaaaggagacttaagagctacatctatcaagacaatttatggacttatttggatactgatttgaacaaactgttgagaccattggaaaaatgtgaaaagtggatatttgatattaaggtttttaattatttttaggtgtgataatggtattgttacattttttaaaggaccccttttagagatgcaaattgaaacacttaaaaaatgaaatgatacgatgtataagtttttgcttaaaaataaggattgaagttggctggtgtgtgtggatatagttgaaacaagattggctgtgagttgataattattgaagctgggtgatgggcacttggggatttattatactattttctctacctgtgtttatatttgaaatttttcatagaagttttaaaatgtggccagttgtgatggctcatacctgtaatcccaacactttgggaggccaaggtgggaggatcacttgagctcaggagttagagaccagcctgggcaaaatagtgagactccatctcaaagaaaaaaaaaaagtgttttaaatgtgaatcaaattcctatagaagctgattcattactgtttttattttagcagtaattcatgataatgacctgtattcataatgattttcataatgattgttttagtggaattaaacttgaaccagtcaagctaacataattatattctgctccagttacaatgaataattaattgatttcaactgctagggtgaactcttgaagctatcagtcatccagcaatcttagcaagcaggccattgggtccctgtttgctctgtctctctctctctctctcactgttgaagggcttagctaactacttaagtaaaatatttgttctctgttaaacatgtcaaggagtatggtcagcttatccacattaagcctgtgtgtcccacgttggagtaaatgttaagtagctcactacaataaactagattcttctgccctctcttgtttaaatgatcatgttccctggaggtggaaatagatctttaaaaagatattctgtagttgtttgttctcagtgtaaaaaaatgagaataatttgataagagtgtaggttgtcttatataaaaagtggttccatttgcatgaattttagaaaaatcattttggaaaaatgaaggctatgtggttatactgaacacattaagcaattttattctttattttaaatgaatattttattatcgttttcttcccttgccctttgggtatgggagttagcctttgtgtttctaaatacaacaggccggtttttataaattaaggtgtcaatatattcttcattatttagttttgtgattgtggttagttttcatttttcttaagtatctgctagtagcatctgtaattaagtgaagtgacctgttaaccattttcctctttctcctcctttcctcctccttgaaacatatcagagcatgtttgaaattctttggcttttatggtatgcatttgctgatatgcattgaccagttaccttactcacagatacttcttaggcacttgattgtgccagggccttggctagatgataagaatacagtagtgaacttaacagtttccctgccctggtgaagcgtatggtcttgtaggtgagatagatatcagataatcatgtgaataaatgtacaattccagctgtgatacatgctgaggaggaggtttttggtgatccaagagctgatcatgcagagataggactgagaaaggagggtgggacgttgtcacagctgataatgcagagataggactgagaaaggagggtgggacatcaggaaggtcagagaattccttatgaaagtgatgcttgagtcaaaatatgatggatgaagagagtttaaatagattacatagaatttttaataatgtcgattggttatatactgggcactgatagctgatttttctttggggaaaggtatgtcagcctagtcattcagattcctttatttttttaaatgttttttcattttttgctttgcattgcattcatttgctgaagagctggcttgtactttggcaggtgtcatacttggttattctccttaggatattggcccaacaatctgggagttgtgaaaggcgcttcgcttttcagacctgggcgtctgtatcatgactatcataaatttaggattaagacacctagcctcctaccaggatgaatgaggtgtccatgtgacctgctgtgccctggaattttatacatctttctctcatagcacacaccatattacaatataatcctgcctcatctaagccaaactttcgagagaatcatttacactcagtggctacttcagctcccattcacttatcaacctgctgcaatttttcacagcccccaaaggactgcagtctgtgccttcagggagctgagggtctagcggaaggaaagaaaccagcagttacagtacagaggggtttgtgttggaaactctacaaacacaggatgccctggtagctcagaggaagtgcatatcgagcatggtaggtaggtagtgggaagagccaagatgacttcccagaggagaaaagctggacctgagttttggagtttcggtaaaagtttgctctaactagtccaagctgctgtcacaagcttttagaaatgatgtaaccatggggcagttgactgtcgtcatgttctttgctattttcatgactctggatgtgcttttcctattccctggattgccctttccctcgattcctctgcaggactgggctttattaatctccatttccttgagcttggctatagtaggtgttcaataaacatttgttttgttgtgtgctttgtaaataggcaatgaagctgatttcacaagataggcacaaaagttagtttcattacaacacattaccaacagctgtatttttaacttttaacatatctcattctaaatcctgtggcagcacaacctccttccgtcatacctggagataaattttctttcaaaatctaatatgcactgtatttatagaatatgaaacataccgaccatgttttgcaaaaatgggaaaggcataacttagctttggggcatgtaagtaacaactcctgataggagaagaaatgtattcagaaagctcaaattagaaataaaatgggagactcta

SEQ ID NO: 206 - protein, 748 aa, Homo sapiens
MVLLRVLILLLSWAAGMGGQYGNPLNKYIRHYEGLSYNVDSLHQKHQRAKRAVSHEDQFLRLDFHAHGRHFNLRMKRDTSLFSDEFKVETSNKVLDYDTSHIYTGHIYGEEGSFSHGSVIDGRFEGFIQTRGGTFYVEPAERYIKDRTLPFHSVIYHEDDINYPHKYGPQGGCADHSVFERMRKYQMTGVEEVTQIPQEEHAANGPELLRKKRTTSAEKNTCQLYIQTDHLFFKYYGTREAVIAQISSHVKAIDTIYQTTDFSGIRNISFMVKRIRINTTADEKDPTNPFRFPNIGVEKFLELNSEQNHDDYCLAYVFTDRDFDDGVLGLAWVGAPSGSSGGICEKSKLYSDGKKKSLNTGIITVQNYGSHVPPKVSHITFAHEVGHNFGSPHDSGTECTPGESKNLGQKENGNYIMYARATSGDKLNNNKFSLCSIRNISQVLEKKRNNCFVESGQPICGNGMVEQGEECDCGYSDQCKDECCFDANQPEGRKCKLKPGKQCSPSQGPCCTAQCAFKSKSEKCRDDSDCAREGICNGFTALCPASDPKPNFTDCNRHTQVCINGQCAGSICEKYGLEECTCASSDGKDDKELCHVCCMKKMDPSTCASTGSVQWSRHFSGRTITLQPGSPCNDFRGYCDVFMRCRLVDADGPLARLKKAIFSPELYENIAEWIVAHWWAVLLMGIALIMLMAGFIKICSVHTPSSNPKLPPPKPLPGTLKRRRPPQPIQQPQRQRPRESYQMGHMRR

SEQ ID NO: 207 - DNA, 1225 bp, Homo sapiens
agccgcctgcatctgtatccagcgccaggtcccgccagtcccagctgcgcgcgccccccagtcccgcacccgttcggcccaggctaagttagccctcaccatgccggtcaaaggaggcaccaagtgcatcaaatacctgctgttcggatttaacttcatcttctggcttgccgggattgctgtccttgccattggactatggctccgattcgactctcagaccaagagcatcttcgagcaagaaactaataataataattccagcttctacacaggagtctatattctgatcggagccggcgccctcatgatgctggtgggcttcctgggctgctgcggggctgtgcaggagtcccagtgcatgctgggactgttcttcggcttcctcttggtgatattcgccattgaaatagctgcggccatctggggatattcccacaaggatgaggtgattaaggaagtccaggagttttacaaggacacctacaacaagctgaaaaccaaggatgagccccagcgggaaacgctgaaagccatccactatgcgttgaactgctgtggtttggctgggggcgtggaacagtttatctcagacatctgccccaagaaggacgtactcgaaaccttcaccgtgaagtcctgtcctgatgccatcaaagaggtcttcgacaataaattccacatcatcggcgcagtgggcatcggcattgccgtggtcatgatatttggcatgatcttcagtatgatcttgtgctgtgctatccgcaggaaccgcgagatggtctagagtcagcttacatccctgagcaggaaagtttacccatgaagattggtgggattttttgtttgtttgttttgttttgtttgttgtttgttgtttgtttttttgccactaattttagtattcattctgcattgctagataaaagctgaagttactttatgtttgtcttttaatgcttcattcaatattgacatttgtagttgagcggggggtttggtttgctttggtttatattttttcagttgtttgtttttgcttgttatattaagcagaaatcctgcaatgaaaggtactatatttgctagactctagacaagatattgtacataaaagaatttttttgtctttaaatagatacaaatgtctatcaactttaatcaagttgtaacttatattgaagacaatttgatacataataaaaaattatgacaatgtcctgga

SEQ ID NO: 208 - protein, 228 aa, Homo sapiens
MPVKGGTKCIKYLLFGFNFIFWLAGIAVLAIGLWLRFDSQTKSIFEQETNNNNSSFYTGVYILIGAGALMMLVGFLGCCGAVQESQCMLGLFFGFLLVIFAIEIAAAIWGYSHKDEVIKEVQEFYKDTYNKLKTKDEPQRETLKAIHYALNCCGLAGGVEQFISDICPKKDVLETFTVKSCPDAIKEVFDNKFHIIGAVGIGIAVVMIFGMIFSMILCCAIRRNREMV

SEQ ID NO: 209 - DNA, 1847 bp, Homo sapiens
agtcggctcgagtactccccgtaacgaggaggtgttctcggccgtcccacccttcactgccgtctccgggctgcgccgccggagccgggacgcgcctccgcagccctcgccgcctccatccccgcggccgcagctcctctcgccgtccgcgcgcacaccatgacgaagaacgagaagaagtccctcaaccagagcctggccgagtggaagctcttcatctacaacccgaccaccggagaattcctggggcgcaccgccaagagctggggtttgatcttgctcttctacctagttttttatgggttcctggctgcactcttctcattcacgatgtgggttatgcttcagactctcaacgatgaggttccaaaataccgtgaccagattcctagcccaggactcatggtttttccaaaaccagtgaccgcattggaatatacattcagtaggtctgatccaacttcgtatgcagggtacattgaagaccttaagaagtttctaaaaccatatactttagaagaacagaagaacctcacagtctgtcctgatggagcactttttgaacagaagggtccagtttatgttgcatgtcagtttcctatttcattacttcaagcatgcagtggtatgaatgatcctgattttggctattctcaaggaaacccttgtattcttgtgaaaatgaacagaataattggattaaagcctgaaggagtgccaaggatagattgtgtttcaaagaatgaagatataccaaatgtagcagtttatcctcataatggaatgatagacttaaaatatttcccatattatgggaaaaaactgcatgttgggtatctacagccattggttgctgttcaggtcagctttgctcctaacaacactgggaaagaagtaacagttgagtgcaagattgatggatcagccaacctaaaaagtcaggatgatcgtgacaagtttttgggacgagttatgttcaaaatcacagcacgtgcatagtatgagtaggatatctccacagagtaaatgttgtgttgtctgtcttcattttgtaacagctggaccttccattctagaattatgagaccaccttggagaaaggtgtgtggtacatgacattgggttacatcataacgtgcttccagatcatagtgttcagtgtcctctgaagtaactgcctgttgcctctgctgccctttgaaccagtgtacagtcgccagatagggaccggtgaacacctgattccaaacatgtaggatgggggtcttgtcctctttttatgtggtttaattgccaagtgtctaaagcttaatatgccgtgctatgtaaatattttatggatataacaactgtcatattttgatgtcaacagagttttagggataaaatggtacccggccaacatcaagtgactttatagctgcaagaaatgtggtatgtggagaagttctgtatgtgaggaaggaaaaaaagaaaataaaagtgtgtttgaaaaatattatcttgggttctttgtaaaatttattttttacatgctgaattagcctcgatctttttgattaagagcacaaacttttttttgtaaaacatgtaaaaaaaaaaactgggattaatttttagtgttggaactgcctcttattttaggctgtagataaaatagcatttttaggttagccagtgtgactatgcacctaattttttatgagattaaattcataagacttaatttgtacaatagtttgtgaaatatcttgttactgcttttatttagcagactgtggactgtaataaagtatataaattgtgaaatataaaaacttggaacttattcaaagcttcaaagcaaa

SEQ ID NO: 210 - protein, 279 aa, Homo sapiens
MTKNEKKSLNQSLAEWKLFIYNPTTGEFLGRTAKSWGLILLFYLVFYGFLAALFSFTMWVMLQTLNDEVPKYRDQIPSPGLMVFPKPVTALEYTFSRSDPTSYAGYIEDLKKFLKPYTLEEQKNLTVCPDGALFEQKGPVYVACQFPISLLQACSGMNDPDFGYSQGNPCILVKMNRIIGLKPEGVPRIDCVSKNEDIPNVAVYPHNGMIDLKYFPYYGKKLHVGYLQPLVAVQVSFAPNNTGKEVTVECKIDGSANLKSQDDRDKFLGRVMFKITARA

SEQ ID NO: 211 - DNA, 5306 bp, Homo sapiens
ctaggcggcggccgcggcggcggaggcagcagcggcggcggcagtggcggcggcgaaggtggcggcggctcggccagtactcccggcccccgccatttcggactgggagcgagcgcggcgcaggcactgaaggcggcggcggggccagaggctcagcggctcccaggtgcgggagagaggcctgctgaaaatgactgaatataaacttgtggtagttggagctggtggcgtaggcaagagtgccttgacgatacagctaattcagaatcattttgtggacgaatatgatccaacaatagaggattcctacaggaagcaagtagtaattgatggagaaacctgtctcttggatattctcgacacagcaggtcaagaggagtacagtgcaatgagggaccagtacatgaggactggggagggctttctttgtgtatttgccataaataatactaaatcatttgaagatattcaccattatagagaacaaattaaaagagttaaggactctgaagatgtacctatggtcctagtaggaaataaatgtgatttgccttctagaacagtagacacaaaacaggctcaggacttagcaagaagttatggaattccttttattgaaacatcagcaaagacaagacagggtgttgatgatgccttctatacattagttcgagaaattcgaaaacataaagaaaagatgagcaaagatggtaaaaagaagaaaaagaagtcaaagacaaagtgtgtaattatgtaaatacaatttgtacttttttcttaaggcatactagtacaagtggtaatttttgtacattacactaaattattagcatttgttttagcattacctaatttttttcctgctccatgcagactgttagcttttaccttaaatgcttattttaaaatgacagtggaagtttttttttcctctaagtgccagtattcccagagttttggtttttgaactagcaatgcctgtgaaaaagaaactgaatacctaagatttctgtcttggggcttttggtgcatgcagttgattacttcttatttttcttaccaattgtgaatgttggtgtgaaacaaattaatgaagcttttgaatcatccctattctgtgttttatctagtcacataaatggattaattactaatttcagttgagaccttctaattggtttttactgaaacattgagggaacacaaatttatgggcttcctgatgatgattcttctaggcatcatgtcctatagtttgtcatccctgatgaatgtaaagttacactgttcacaaaggttttgtctcctttccactgctattagtcatggtcactctccccaaaatattatattttttctataaaaagaaaaaaatggaaaaaaattacaaggcaatggaaactattataaggccatttccttttcacattagataaattactataaagactcctaatagcttttcctgttaaggcagacccagtatgaaatggggattattatagcaaccattttggggctatatttacatgctactaaatttttataataattgaaaagattttaacaagtataaaaaattctcataggaattaaatgtagtctccctgtgtcagactgctctttcatagtataactttaaatcttttcttcaacttgagtctttgaagatagttttaattctgcttgtgacattaaaagattatttgggccagttatagcttattaggtgttgaagagaccaaggttgcaaggccaggccctgtgtgaacctttgagctttcatagagagtttcacagcatggactgtgtccccacggtcatccagtgttgtcatgcattggttagtcaaaatggggagggactagggcagtttggatagctcaacaagatacaatctcactctgtggtggtcctgctgacaaatcaagagcattgcttttgtttcttaagaaaacaaactcttttttaaaaattacttttaaatattaactcaaaagttgagattttggggtggtggtgtgccaagacattaattttttttttaaacaatgaagtgaaaaagttttacaatctctaggtttggctagttctcttaacactggttaaattaacattgcataaacacttttcaagtctgatccatatttaataatgctttaaaataaaaataaaaacaatccttttgataaatttaaaatgttacttattttaaaataaatgaagtgagatggcatggtgaggtgaaagtatcactggactaggaagaaggtgacttaggttctagataggtgtcttttaggactctgattttgaggacatcacttactatccatttcttcatgttaaaagaagtcatctcaaactcttagttttttttttttacaactatgtaatttatattccatttacataaggatacacttatttgtcaagctcagcacaatctgtaaatttttaacctatgttacaccatcttcagtgccagtcttgggcaaaattgtgcaagaggtgaagtttatatttgaatatccattctcgttttaggactcttcttccatattagtgtcatcttgcctccctaccttccacatgccccatgacttgatgcagttttaatacttgtaattcccctaaccataagatttactgctgctgtggatatctccatgaagttttcccactgagtcacatcagaaatgccctacatcttatttcctcagggctcaagagaatctgacagataccataaagggatttgacctaatcactaattttcaggtggtggctgatgctttgaacatctctttgctgcccaatccattagcgacagtaggatttttcaaacctggtatgaatagacagaaccctatccagtggaaggagaatttaataaagatagtgctgaaagaattccttaggtaatctataactaggactactcctggtaacagtaatacattccattgttttagtaaccagaaatcttcatgcaatgaaaaatactttaattcatgaagcttactttttttttttggtgtcagagtctcgctcttgtcacccaggctggaatgcagtggcgccatctcagctcactgcaacctccatctcccaggttcaagcgattctcgtgcctcggcctcctgagtagctgggattacaggcgtgtgccactacactcaactaatttttgtatttttaggagagacggggtttcaccctgttggccaggctggtctcgaactcctgacctcaagtgattcacccaccttggcctcataaacctgttttgcagaactcatttattcagcaaatatttattgagtgcctaccagatgccagtcaccacacaaggcactgggtatatggtatccccaaacaagagacataatcccggtccttaggtagtgctagtgtggtctgtaatatcttactaaggcctttggtatacgacccagagataacacgatgcgtattttagttttgcaaagaaggggtttggtctctgtgccagctctataattgttttgctacgattccactgaaactcttcgatcaagctactttatgtaaatcacttcattgttttaaaggaataaacttgattatattgtttttttatttggcataactgtgattcttttaggacaattactgtacacattaaggtgtatgtcagatattcatattgacccaaatgtgtaatattccagttttctctgcataagtaattaaaatatacttaaaaattaatagttttatctgggtacaaataaacaggtgcctgaactagttcacagacaaggaaacttctatgtaaaaatcactatgatttctgaattgctatgtgaaactacagatctttggaacactgtttaggtagggtgttaagacttacacagtacctcgtttctacacagagaaagaaatggccatacttcaggaactgcagtgcttatgaggggatatttaggcctcttgaatttttgatgtagatgggcatttttttaaggtagtggttaattacctttatgtgaactttgaatggtttaacaaaagatttgtttttgtagagattttaaagggggagaattctagaaataaatgttacctaattattacagccttaaagacaaaaatccttgttgaagtttttttaaaaaaagctaaattacatagacttaggcattaacatgtttgtggaagaatatagcagacgtatattgtatcatttgagtgaatgttcccaagtaggcattctaggctctatttaactgagtcacactgcataggaatttagaacctaacttttataggttatcaaaactgttgtcaccattgcacaattttgtcctaatatatacatagaaactttgtggggcatgttaagttacagtttgcacaagttcatctcatttgtattccattgattttttttttcttctaaacattttttcttcaaacagtatataactttttttaggggatttttttttagacagcaaaaactatctgaagatttccatttgtcaaaaagtaatgatttcttgataattgtgtagtaatgttttttagaacccagcagttaccttaaagctgaatttatatttagtaacttctgtgttaatactggatagcatgaattctgcattgagaaactgaatagctgtcataaaatgaaactttctttctaaagaaagatactcacatgagttcttgaagaatagtcataactagattaagatctgtgttttagtttaatagtttgaagtgcctgtttgggataatgataggtaatttagatgaatttaggggaaaaaaaagttatctgcagatatgttgagggcccatctctccccccacacccccacagagctaactgggttacagtgttttatccgaaagtttccaattccactgtcttgtgttttcatgttgaaaatacttttgcatttttcctttgagtgccaatttcttactagtactatttcttaatgtaacatgtttacctggaatgtattttaactatttttgtatagtgtaaactgaaacatgcacattttgtacattgtgctttcttttgtgggacatatgcagtgtgatccagttgttttccatcatttggttgcgctgacctaggaatgttggtcatatcaaacattaaaaatgaccactcttttaattgaaattaacttttaaatgtttataggagtatgtgctgtgaagtgatctaaaatttgtaatatttttgtcatgaactgtactactcctaattattgtaatgtaataaaaatagttacagtgac

SEQ ID NO: 212 - protein, 188 aa, Homo sapiens [sequence omitted]

SEQ ID NO: 213 - DNA, 42 bp, Artificial Sequence
  Description of Artificial Sequence: Synthetic oligonucleotide
aaaaagaagaaaaagaagaagaagacaaagtgtgtaattatg

SEQ ID NO: 214 - protein, 14 aa, Artificial Sequence
  Description of Artificial Sequence: Synthetic peptide
KKKKKKKKTKCVIM

SEQ ID NO: 215 - DNA, 4296 bp, Homo sapiens
gcacttgggcgttggaccccgcatcttattagcaaccagggagatttctccattttcctcttgtctacagtgcggctacaaatctgggatttttttattacttctttttttttcgaactacacttgggctcctttttttgtgctcgacttttccaccctttttccctccctcctgtgctgctgctttttgatctcttcgactaaaatttttttatccggagtgtatttaatcggttctgttctgtcctctccaccacccccacccccctccctccggtgtgtgtgccgctgccgctgttgccgccgccgctgctgctgctgctcgccccgtcgttacaccaacccgaggctctttgtttcccctcttggatctgttgagtttctttgttgaagaagccagcatgggtgcccagttctccaagaccgcagcgaagggagaagccgccgcggagaggcctggggaggcggctgtggcctcgtcgccttccaaagcgaacggacaggagaatggccacgtgaaggtaaacggcgacgcttcgcccgcggccgccgagtcgggcgccaaggaggagctgcaggccaacggcagcgccccggccgccgacaaggaggagcccgcggccgccgggagcggggcggcgtcgccctccgcggccgagaaaggtgagccggccgccgccgctgcccccgaggccggggccagcccggtagagaaggaggcccccgcggaaggcgaggctgccgagcccggctcgcccacggccgcggagggagaggccgcgtcggccgcctcctcgacttcttcgcccaaggccgaggacggggccacgccctcgcccagcaacgagaccccgaaaaaaaaaaagaagcgcttttccttcaagaagtctttcaagctgagcggcttctccttcaagaagaacaagaaggaggctggagaaggcggtgaggctgaggcgcccgctgccgaaggcggcaaggacgaggccgccgggggcgcagctgcggccgccgccgaggcgggcgcggcctccggggagcaggcagcggcgccgggcgaggaggcggcagcgggcgaggagggggcggcgggtggcgacccgcaggaggccaagccccaggaggccgctgtcgcgccagagaagccgcccgccagcgacgagaccaaggccgccgaggagcccagcaaggtggaggagaaaaaggccgaggaggccggggccagcgccgccgcctgcgaggccccctccgccgccgggcccggcgcgcccccggagcaggaggcagcccccgcggaggagcccgcggccgccgcagcctcgtcagcctgcgcagccccctcacaggaggcccagcccgagtgcagtccagaagcccccccagcggaggcggcagagtaaaagagcaagcttttgtgagataatcgaagaacttttctcccccgtttgtttgttggagtggtgccaggtactggttttggagaacttgtctacaaccagggattgattttaaagatgtctttttttattttacttttttttaagcaccaaattttgttgttttttttttttctcccctccccacagatcccatctcaaatcattctgttaaccaccattccaacaggtcgaggagagcttaaacaccttcttcctctgccttgtttctcttttattttttattttttcgcatcagtattaatgtttttgcatactttgcatctttattcaaaagtgtaaactttctttgtcaatctatggacatgcccatatatgaaggagatgggtgggtcaaaaagggatatcaaatgaagtgatggggtcacaatggggaaattgaagtggtgcataacattgccaaaatagtgtgccactagaaatggtgtaaaggctgtcttttttttttttttaaaagaaaagttattaccatgtattttgtgaggcaggtttacaacactacaagtcttgagttaagaaggaaagaggaaaaaagaaaaaacaccaatacccagatttaaaaaaaaaaaaacgatcatagtcttaggagttcatttaaaccataggaacttttcacttatctcatgttagctgtaccagtcagtgattaagtagaactacaagttgtataggctttattgtttattgctggtttatgaccttaataaagtgtaattatgtattaccagcagggtgtttttaactgtgactattgtataaaaacaaatcttgatatccagaagcacatgaagtttgcaactttccaccctgcccatttttgtaaaactgcagtcatcttggaccttttaaaacacaaattttaaactcaaccaagctgtgataagtggaatggttactgtttatactgtggtatgtttttgattacagcagataatgctttcttttccagtcgtctttgagaataaaggaaaaaaaatcttcagatgcaatggttttgtgtagcatcttgtctatcatgttttgtaaatactggagaagctttgaccaatttgacttagagatggaatgtaactttgcttacaaaaattgctattaaactcctgcttaaggtgttctaattttctgtgagcacactaaaagcgaaaaataaatgtgaataaaatgtacaaatttgttgtgtttttttatgttctaataatactgagacttctaggtcttaggttaatttttaggaagatcttgcatgccatcaggagtaaattttattgtggttcttaatctgaagttttcaagctctgaaattcataatccgcagtgtcagattacgtagaggaagatcttacaacatttccatgtcaaatctgttaccatttattggcatttagttttcatttaagaattgaacataattatttttattgtagctatatagcatgtcagattaaatcatttacaacaaaaggggtgtgaacctaagactatttaaatgtcttatgagaaaatttcataaagccattctcttgtcattcaggtccagaaacaaattttaaactgagtgagagtctatagaatccatactgcagatgggtcatgaaatgtgaccaaatgtgtttcaaaaattgatggtgtattacctgctattgtaattgcttagtgcttggctaatttccaaattattgcataatatgttctaccttaagaaaacaggtttatgtaacaaagtaatggtgttgaatggatgatgtcagttcatgggcctttagcatagttttaagcatccttttttttttttttttttgaaagtgtgttagcatcttgttactcaaaggataagacagacaataatacttcactgaatcttaataatctttactagtttacctcctctgctctttgccacccgataactggatatcttttccttcaaaggaccctaaactgattgaaatttaagatatgtatcaaaaacattatttcatttaatgcacatctgttttgctgtttttgagcagtgtgcagtttagggttcatgataaatcattgaaccacatgtgtaacaactgaatgccaaatcttaaactcattagaaaaataacaaattaggttttgacacgcattcttaattggaataatggatcaaaaatagtggttcatgaccttaccaaacacccttgctactaataaaatcaaataacacttagaagggtatgtatttttagttagggtttcttgatcttggaggatgtttgaaagttaaaaattgaatttggtaaccaaaggactgatttatgggtctttcctatcttaaccaacgttttcttagttacctagatggccaagtacagtgcctggtatgtagtaagactcagtaaaaaagtggatttttaaaaataactcccaaagtgaatagtcaaaaatcctgttagcaaactgttatatattgctaagtttgttcttttaacagctggaatttattaagatgcattattttgattttattcactgcctaaaacactttgggtggtattgatggagttggtggattttcctccaagtgattaaatgaaatttgacgtatcttttcatccaaagttttgtacatcatgttttctaacggaaaaaaatgttaatatggcttttttgtattactaaaaatagctttgagattaaggaaaaataaataactcttgtacagttcagtattgtctattaaatctgtattggcagtatgtataatggcatttgctgtggttacaaaatacttcctctgggttataataatcatttgatccaattcctattgcttgtaaaataaagttttaccagttgatataatcaa

SEQ ID NO: 216 - protein, 332 aa, Homo sapiens
MGAQFSKTAAKGEAAAERPGEAAVASSPSKANGQENGHVKVNGDASPAAAESGAKEELQANGSAPAADKEEPAAAGSGAASPSAAEKGEPAAAAAPEAGASPVEKEAPAEGEAAEPGSPTAAEGEAASAASSTSSPKAEDGATPSPSNETPKKKKKRFSFKKSFKLSGFSFKKNKKEAGEGGEAEAPAAEGGKDEAAGGAAAAAAEAGAASGEQAAAPGEEAAAGEEGAAGGDPQEAKPQEAAVAPEKPPASDETKAAEEPSKVEEKKAEEAGASAAACEAPSAAGPGAPPEQEAAPAEEPAAAAASSACAAPSQEAQPECSPEAPPAEAAE

SEQ ID NO: 217 - DNA, 24 bp, Artificial Sequence
  Description of Artificial Sequence: Synthetic oligonucleotide
atgggttgctgtttctccaagacc

SEQ ID NO: 218 - protein, 8 aa, Artificial Sequence
  Description of Artificial Sequence: Synthetic peptide
MGCCFSKT

SEQ ID NO: 219 - DNA, 2079 bp, Artificial Sequence
  Description of Artificial Sequence: Synthetic polynucleotide
atgtacaggatgcaactcctgtcttgcattgcactaagtcttgcacttgtcacgaactcgatatcggccatggttagatctgacaaaactcacacatgcccaccgtgcccagcacctgaactcctggggggaccgtcagtcttcctcttccccccaaaacccaaggacaccctcatgatctcccggacccctgaggtcacatgcgtggtggtggacgtgagccacgaagaccctgaggtcaagttcaactggtacgtggacggcgtggaggtgcataatgccaagacaaagccgcgggaggagcagtacaacagcacgtaccgtgtggtcagcgtcctcaccgtcctgcaccaggactggctgaatggcaaggagtacaagtgcaaggtctccaacaaagccctcccagcccccatcgagaaaaccatctccaaagccaaagggcagccccgagaaccacaggtgtacaccctgcccccatcccgggaggagatgaccaagaaccaggtcagcctgacctgcctggtcaaaggcttctatcccagcgacatcgccgtggagtgggagagcaatgggcagccggagaacaactacaagaccacgcctcccgtgctggactccgacggctccttcttcctctacagcaagctcaccgtggacaagagcaggtggcagcaggggaacgtcttctcatgctccgtgatgcacgaggctctgcacaaccactacacgcagaagagcctctccctgtctccgggtaaagccagcggaagtggcggaggaggcggtcctggagaaggtgcctatgtataccgctcagcattcagtgtgggattggagacttacgttactatccccaacatgcccattcgctttaccaagatcttctacaatcagcaaaaccactatgatggctccactggtaaattccactgcaacattcctgggctgtactactttgcctaccacatcacagtctatatgaaggatgtgaaggtcagcctcttcaagaaggacaaggctatgctcttcacctatgatcagtaccaggaaaataatgtggaccaggcctccggctctgtgctcctgcatctggaggtgggcgaccaagtctggctccaggtgtatggggaaggagagcgtaatggactctatgctgataatgacaatgactccaccttcacaggctttcttctctaccatgacaccaactctagaaagcttcctggagaaggtgcctatgtataccgctcagcattcagtgtgggattggagacttacgttactatccccaacatgcccattcgctttaccaagatcttctacaatcagcaaaaccactatgatggctccactggtaaattccactgcaacattcctgggctgtactactttgcctaccacatcacagtctatatgaaggatgtgaaggtcagcctcttcaagaaggacaaggctatgctcttcacctatgatcagtaccaggaaaataatgtggaccaggcctccggctctgtgctcctgcatctggaggtgggcgaccaagtctggctccaggtgtatggggaaggagagcgtaatggactctatgctgataatgacaatgactccaccttcacaggctttcttctctaccatgacaccaacactagtcctggagaaggtgcctatgtataccgctcagcattcagtgtgggattggagacttacgttactatccccaacatgcccattcgctttaccaagatcttctacaatcagcaaaaccactatgatggctccactggtaaattccactgcaacattcctgggctgtactactttgcctaccacatcacagtctatatgaaggatgtgaaggtcagcctcttcaagaaggacaaggctatgctcttcacctatgatcagtaccaggaaaataatgtggaccaggcctccggctctgtgctcctgcatctggaggtgggcgaccaagtctggctccaggtgtatggggaaggagagcgtaatggactctatgctgataatgacaatgactccaccttcacaggctttcttctctaccatgacaccaactaa

SEQ ID NO: 220 - protein, 227 aa, Artificial Sequence
  Description of Artificial Sequence: Synthetic polypeptide
DKTHTCPPCPAPELLGGPSVFLFPPKPKDTLMISRTPEVTCVVVDVSHEDPEVKFNWYVDGVEVHNAKTKPREEQYNSTYRVVSVLTVLHQDWLNGKEYKCKVSNKALPAPIEKTISKAKGQPREPQVYTLPPSREEMTKNQVSLTCLVKGFYPSDIAVEWESNGQPENNYKTTPPVLDSDGSFFLYSKLTVDKSRWQQGNVFSCSVMHEALHNHYTQKSLSLSPGK

SEQ ID NO: 221 - DNA, 27 bp, Artificial Sequence
  Description of Artificial Sequence: Synthetic oligonucleotide
gctactaacttcagcctgctgaagcag

SEQ ID NO: 222 - protein, 17 aa, Artificial Sequence
  Description of Artificial Sequence: Synthetic peptide
ATNFSLKQAGDVENPGP

SEQ ID NO: 223 - DNA, 1290 bp, Artificial Sequence
  Description of Artificial Sequence: Synthetic polynucleotide
atggcttgccttggatttcagcggcacaaggctcagctgaacctggctaccaggacctggccctgcactctcctgttttttcttctcttcatccctgtcttctgcaaagcaatgcacgtggcccagcctgctgtggtactggccagcagccgaggcatcgccagctttgtgtgtgagtatgcatctccaggcaaagccactgaggtccgggtgacagtgcttcggcaggctgacagccaggtgactgaagtctgtgcggcaacctacatgatggggaatgagttgaccttcctagatgattccatctgcacgggcacctccagtggaaatcaagtgaacctcactatccaaggactgagggccatggacacgggactctacatctgcaaggtggagctcatgtacccaccgccatactacctgggcataggcaacggaacccagatttatgtaattgatccagaaccgtgcccagattctgacatcgatgacaaaactcacacatgcccaccgtgcccagcacctgaactcctggggggaccgtcagtcttcctcttccccccaaaacccaaggacaccctcatgatctcccggacccctgaggtcacatgcgtggtggtggacgtgagccacgaagaccctgaggtcaagttcaactggtacgtggacggcgtggaggtgcataatgccaagacaaagccgcgggaggagcagtacaacagcacgtaccgtgtggtcagcgtcctcaccgtcctgcaccaggactggctgaatggcaaggagtacaagtgcaaggtctccaacaaagccctcccagcccccatcgagaaaaccatctccaaagccaaagggcagccccgagaaccacaggtgtacaccctgcccccatcccgggaggagatgaccaagaaccaggtcagcctgacctgcctggtcaaaggcttctatcccagcgacatcgccgtggagtgggagagcaatgggcagccggagaacaactacaagaccacgcctcccgtgctggactccgacggctccttcttcctctacagcaagctcaccgtggacaagagcaggtggcagcaggggaacgtcttctcatgctccgtgatgcacgaggctctgcacaaccactacacgcagaagagcctctccctgtctccgggtaaaatcgatccaaataaaggaagtggaaccacttcaggtactacccgtcttctatctgggcacacgtgtttcacgttgacaggtttgcttgggacgctagtaaccatgggcttgctgacttag

SEQ ID NO: 224 - protein, 429 aa, Artificial Sequence
  Description of Artificial Sequence: Synthetic polypeptide
MACLGFQRHKAQLNLATRTWPCTLLFFLLFIPVFCKAMHVAQPAVVLASSRGIASFVCEYASPGKATEVRVTVLRQADSQVTEVCAATYMMGNELTFLDDSICTGTSSGNQVNLTIQGLRAMDTGLYICKVELMYPPPYYLGIGNGTQIYVIDPEPCPDSDIDDKTHTCPPCPAPELLGGPSVFLFPPKPKDTLMISRTPEVTCVVVDVSHEDPEVKFNWYVDGVEVHNAKTKPREEQYNSTYRVVSVLTVLHQDWLNGKEYKCKVSNKALPAPIEKTISKAKGQPREPQVYTLPPSREEMTKNQVSLTCLVKGFYPSDIAVEWESNGQPENNYKTTPPVLDSDGSFFLYSKLTVDKSRWQQGNVFSCSVMHEALHNHYTQKSLSLSPGKIDPNKGSGTTSGTTRLLSGHTCFTLTGLLGTLVTMGLLT

SEQ ID NO: 225 - DNA, 828 bp, Artificial Sequence
  Description of Artificial Sequence: Synthetic polynucleotide
atgaggatatttgctgtctttatattcatgacctactggcatttgctgaacgcatttactgtcacggttcccaaggacctatatgtggtagagtatggtagcaatatgacaattgaatgcaaattcccagtagaaaaacaattagacctggctgcactaattgtctattgggaaatggaggataagaacattattcaatttgtgcatggagaggaagacctgaaggttcagcatagtagctacagacagagggcccggctgttgaaggaccagctctccctgggaaatgctgcacttcagatcacagatgtgaaattgcaggatgcaggggtgtaccgctgcatgatcagctatggtggtgccgactacaagcgaattactgtgaaagtcaatgccccatacaacaaaatcaaccaaagaattttggttgtggatccagtcacctctgaacatgaactgacatgtcaggctgagggctaccccaaggccgaagtcatctggacaagcagtgaccatcaagtcctgagtggtaagaccaccaccaccaattccaagagagaggagaagcttttcaatgtgaccagcacactgagaatcaacacaacaactaatgagattttctactgcacttttaggagattagatcctgaggaaaaccatacagctgaattggtcatcccagaactacctctggcacatcctccaaatgaaaggccaaataaaggaagtggaaccacttcaggtactacccgtcttctatctgggcacacgtgtttcacgttgacaggtttgcttgggacgctagtaaccatgggcttgctgacttag

SEQ ID NO: 226 - protein, 275 aa, Artificial Sequence
  Description of Artificial Sequence: Synthetic polypeptide
MRIFAVFIFMTYWHLLNAFTVTVPKDLYVVEYGSNMTIECKFPVEKQLDLAALIVYWEMEDKNIIQFVHGEEDLKVQHSSYRQRARLLKDQLSLGNAALQITDVKLQDAGVYRCMISYGGADYKRITVKVNAPYNKINQRILVVDPVTSEHELTCQAEGYPKAEVIWTSSDHQVLSGKTTTTNSKREEKLFNVTSTLRINTTTNEIFYCTFRRLDPEENHTAELVIPELPLAHPPNERPNKGSGTTSGTTRLLSGHTCFTLTGLLGTLVTMGLLT

SEQ ID NO: 227 - DNA, 1518 bp, Artificial Sequence
  Description of Artificial Sequence: Synthetic polynucleotide
atgaggatatttgctgtctttatattcatgacctactggcatttgctgaacgcatttactgtcacggttcccaaggacctatatgtggtagagtatggtagcaatatgacaattgaatgcaaattcccagtagaaaaacaattagacctggctgcactaattgtctattgggaaatggaggataagaacattattcaatttgtgcatggagaggaagacctgaaggttcagcatagtagctacagacagagggcccggctgttgaaggaccagctctccctgggaaatgctgcacttcagatcacagatgtgaaattgcaggatgcaggggtgtaccgctgcatgatcagctatggtggtgccgactacaagcgaattactgtgaaagtcaatgccccatacaacaaaatcaaccaaagaattttggttgtggatccagtcacctctgaacatgaactgacatgtcaggctgagggctaccccaaggccgaagtcatctggacaagcagtgaccatcaagtcctgagtggtaagaccaccaccaccaattccaagagagaggagaagcttttcaatgtgaccagcacactgagaatcaacacaacaactaatgagattttctactgcacttttaggagattagatcctgaggaaaaccatacagctgaattggtcatcccagaactacctctggcacatcctccaaatgaaaggatcgatgtcgagccactgggcatggagaatgggaacattgccaactcacagatcgccgcctcatctgtgcgtgtgaccttcttgggtttgcagcattgggtcccggagctggcccgcctgaaccgcgcaggcatggtcaatgcctggacacccagcagcaatgacgataacccctggatccaggtgaacctgctgcggaggatgtgggtaacaggtgtggtgacgcagggtgccagccgcttggccagtcatgagtacctgaaggccttcaaggtggcctacagccttaatggacacgaattcgatttcatccatgatgttaataaaaaacacaaggagtttgtgggtaactggaacaaaaacgcggtgcatgtcaacctgtttgagacccctgtggaggctcagtacgtgagattgtaccccacgagctgccacacggcctgcactctgcgctttgagctactgggctgtgagctgaacggatgcgccaatcccctgggcctgaagaataacagcatccctgacaagcagatcacggcctccagcagctacaagacctggggcttgcatctcttcagctggaacccctcctatgcacggctggacaagcagggcaacttcaacgcctgggttgcggggagctacggtaacgatcagtggctgcagatcttccctggcaactgggacaaccactcccacaagaagaacttgtttgagacgcccatcctggctcgctatgtgcgcatcctgcctgtagcctggcacaaccgcatcgccctgcgcctggagctgctgggctgttag

SEQ ID NO: 228 - protein, 505 aa, Artificial Sequence
  Description of Artificial Sequence: Synthetic polypeptide
MRIFAVFIFMTYWHLLNAFTVTVPKDLYVVEYGSNMTIECKFPVEKQLDLAALIVYWEMEDKNIIQFVHGEEDLKVQHSSYRQRARLLKDQLSLGNAALQITDVKLQDAGVYRCMISYGGADYKRITVKVNAPYNKINQRILVVDPVTSEHELTCQAEGYPKAEVIWTSSDHQVLSGKTTTTNSKREEKLFNVTSTLRINTTTNEIFYCTFRRLDPEENHTAELVIPELPLAHPPNERIDVEPLGMENGNIANSQIAASSVRVTFLGLQHWVPELARLNRAGMVNAWTPSSNDDNPWIQVNLLRRMWVTGVVTQGASRLASHEYLKAFKVAYSLNGHEFDFIHDVNKKHKEFVGNWNKNAVHVNLFETPVEAQYVRLYPTSCHTACTLRFELLGCELNGCANPLGLKNNSIPDKQITASSSYKTWGLHLFSWNPSYARLDKQGNFNAWVAGSYGNDQWLQIFPGNWDNHSHKKNLFETPILARYVRILPVAWHNRIALRLELLGC

SEQ ID NO: 229 - DNA, 1521 bp, Artificial Sequence
  Description of Artificial Sequence: Synthetic polynucleotide
atgaggatatttgctgtctttatattcatgacctactggcatttgctgaacgcatttactgtcacggttcccaaggacctatatgtggtagagtatggtagcaatatgacaattgaatgcaaattcccagtagaaaaacaattagacctggctgcactaattgtctattgggaaatggaggataagaacattattcaatttgtgcatggagaggaagacctgaaggttcagcatagtagctacagacagagggcccggctgttgaaggaccagctctccctgggaaatgctgcacttcagatcacagatgtgaaattgcaggatgcaggggtgtaccgctgcatgatcagctatggtggtgccgactacaagcgaattactgtgaaagtcaatgccccatacaacaaaatcaaccaaagaattttggttgtggatccagtcacctctgaacatgaactgacatgtcaggctgagggctaccccaaggccgaagtcatctggacaagcagtgaccatcaagtcctgagtggtaagaccaccaccaccaattccaagagagaggagaagcttttcaatgtgaccagcacactgagaatcaacacaacaactaatgagattttctactgcacttttaggagattagatcctgaggaaaaccatacagctgaattggtcatcccagaactacctctggcacatcctccaaatgaaaggatcgatgacaaaactcacacatgcccaccgtgcccagcacctgaactcctggggggaccgtcagtcttcctcttccccccaaaacccaaggacaccctcatgatctcccggacccctgaggtcacatgcgtggtggtggacgtgagccacgaagaccctgaggtcaagttcaactggtacgtggacggcgtggaggtgcataatgccaagacaaagccgcgggaggagcagtacaacagcacgtaccgtgtggtcagcgtcctcaccgtcctgcaccaggactggctgaatggcaaggagtacaagtgcaaggtctccaacaaagccctcccagcccccatcgagaaaaccatctccaaagccaaagggcagccccgagaaccacaggtgtacaccctgcccccatcccgggaggagatgaccaagaaccaggtcagcctgacctgcctggtcaaaggcttctatcccagcgacatcgccgtggagtgggagagcaatgggcagccggagaacaactacaagaccacgcctcccgtgctggactccgacggctccttcttcctctacagcaagctcaccgtggacaagagcaggtggcagcaggggaacgtcttctcatgctccgtgatgcacgaggctctgcacaaccactacacgcagaagagcctctccctgtctccgggtaaaatcgatccaaataaaggaagtggaaccacttcaggtactacccgtcttctatctgggcacacgtgtttcacgttgacaggtttgcttgggacgctagtaaccatgggcttgctgacttag

SEQ ID NO: 230 - protein, 506 aa, Artificial Sequence
  Description of Artificial Sequence: Synthetic polypeptide
MRIFAVFIFMTYWHLLNAFTVTVPKDLYVVEYGSNMTIECKFPVEKQLDLAALIVYWEMEDKNIIQFVHGEEDLKVQHSSYRQRARLLKDQLSLGNAALQITDVKLQDAGVYRCMISYGGADYKRITVKVNAPYNKINQRILVVDPVTSEHELTCQAEGYPKAEVIWTSSDHQVLSGKTTTTNSKREEKLFNVTSTLRINTTTNEIFYCTFRRLDPEENHTAELVIPELPLAHPPNERIDDKTHTCPPCPAPELLGGPSVFLFPPKPKDTLMISRTPEVTCVVVDVSHEDPEVKFNWYVDGVEVHNAKTKPREEQYNSTYRVVSVLTVLHQDWLNGKEYKCKVSNKALPAPIEKTISKAKGQPREPQVYTLPPSREEMTKNQVSLTCLVKGFYPSDIAVEWESNGQPENNYKTTPPVLDSDGSFFLYSKLTVDKSRWQQGNVFSCSVMHEALHNHYTQKSLSLSPGKIDPNKGSGTTSGTTRLLSGHTCFTLTGLLGTLVTMGLLT

SEQ ID NO: 231 - DNA, 1464 bp, Artificial Sequence
  Description of Artificial Sequence: Synthetic polynucleotide
atgatcttcctcctgctaatgttgagcctggaattgcagcttcaccagatagcagctttattcacagtgacagtccctaaggaactgtacataatagagcatggcagcaatgtgaccctggaatgcaactttgacactggaagtcatgtgaaccttggagcaataacagccagtttgcaaaaggtggaaaatgatacatccccacaccgtgaaagagccactttgctggaggagcagctgcccctagggaaggcctcgttccacatacctcaagtccaagtgagggacgaaggacagtaccaatgcataatcatctatggggtcgcctgggactacaagtacctgactctgaaagtcaaagcttcctacaggaaaataaacactcacatcctaaaggttccagaaacagatgaggtagagctcacctgccaggctacaggttatcctctggcagaagtatcctggccaaacgtcagcgttcctgccaacaccagccactccaggacccctgaaggcctctaccaggtcaccagtgttctgcgcctaaagccaccccctggcagaaacttcagctgtgtgttctggaatactcacgtgagggaacttactttggccagcattgaccttcaaagtcagatggaacccaggacccatccaactatcgatgtcgagccactgggcatggagaatgggaacattgccaactcacagatcgccgcctcatctgtgcgtgtgaccttcttgggtttgcagcattgggtcccggagctggcccgcctgaaccgcgcaggcatggtcaatgcctggacacccagcagcaatgacgataacccctggatccaggtgaacctgctgcggaggatgtgggtaacaggtgtggtgacgcagggtgccagccgcttggccagtcatgagtacctgaaggccttcaaggtggcctacagccttaatggacacgaattcgatttcatccatgatgttaataaaaaacacaaggagtttgtgggtaactggaacaaaaacgcggtgcatgtcaacctgtttgagacccctgtggaggctcagtacgtgagattgtaccccacgagctgccacacggcctgcactctgcgctttgagctactgggctgtgagctgaacggatgcgccaatcccctgggcctgaagaataacagcatccctgacaagcagatcacggcctccagcagctacaagacctggggcttgcatctcttcagctggaacccctcctatgcacggctggacaagcagggcaacttcaacgcctgggttgcggggagctacggtaacgatcagtggctgcagatcttccctggcaactgggacaaccactcccacaagaagaacttgtttgagacgcccatcctggctcgctatgtgcgcatcctgcctgtagcctggcacaaccgcatcgccctgcgcctggagctgctgggctgttag

SEQ ID NO: 232 - protein, 487 aa, Artificial Sequence
  Description of Artificial Sequence: Synthetic polypeptide
MIFLLLMLSLELQLHQIAALFTVTVPKELYIIEHGSNVTLECNFDTGSHVNLGAITASLQKVENDTSPHRERATLLEEQLPLGKASFHIPQVQVRDEGQYQCIIIYGVAWDYKYLTLKVKASYRKINTHILKVPETDEVELTCQATGYPLAEVSWPNVSVPANTSHSRTPEGLYQVTSVLRLKPPPGRNFSCVFWNTHVRELTLASIDLQSQMEPRTHPTIDVEPLGMENGNIANSQIAASSVRVTFLGLQHWVPELARLNRAGMVNAWTPSSNDDNPWIQVNLLRRMWVTGVVTQGASRLASHEYLKAFKVAYSLNGHEFDFIHDVNKKHKEFVGNWNKNAVHVNLFETPVEAQYVRLYPTSCHTACTLRFELLGCELNGCANPLGLKNNSIPDKQITASSSYKTWGLHLFSWNPSYARLDKQGNFNAWVAGSYGNDQWLQIFPGNWDNHSHKKNLFETPILARYVRILPVAWHNRIALRLELLGC

SEQ ID NO: 233 - DNA, 1467 bp, Artificial Sequence
  Description of Artificial Sequence: Synthetic polynucleotide
atgatcttcctcctgctaatgttgagcctggaattgcagcttcaccagatagcagctttattcacagtgacagtccctaaggaactgtacataatagagcatggcagcaatgtgaccctggaatgcaactttgacactggaagtcatgtgaaccttggagcaataacagccagtttgcaaaaggtggaaaatgatacatccccacaccgtgaaagagccactttgctggaggagcagctgcccctagggaaggcctcgttccacatacctcaagtccaagtgagggacgaaggacagtaccaatgcataatcatctatggggtcgcctgggactacaagtacctgactctgaaagtcaaagcttcctacaggaaaataaacactcacatcctaaaggttccagaaacagatgaggtagagctcacctgccaggctacaggttatcctctggcagaagtatcctggccaaacgtcagcgttcctgccaacaccagccactccaggacccctgaaggcctctaccaggtcaccagtgttctgcgcctaaagccaccccctggcagaaacttcagctgtgtgttctggaatactcacgtgagggaacttactttggccagcattgaccttcaaagtcagatggaacccaggacccatccaactatcgatgacaaaactcacacatgcccaccgtgcccagcacctgaactcctggggggaccgtcagtcttcctcttccccccaaaacccaaggacaccctcatgatctcccggacccctgaggtcacatgcgtggtggtggacgtgagccacgaagaccctgaggtcaagttcaactggtacgtggacggcgtggaggtgcataatgccaagacaaagccgcgggaggagcagtacaacagcacgtaccgtgtggtcagcgtcctcaccgtcctgcaccaggactggctgaatggcaaggagtacaagtgcaaggtctccaacaaagccctcccagcccccatcgagaaaaccatctccaaagccaaagggcagccccgagaaccacaggtgtacaccctgcccccatcccgggaggagatgaccaagaaccaggtcagcctgacctgcctggtcaaaggcttctatcccagcgacatcgccgtggagtgggagagcaatgggcagccggagaacaactacaagaccacgcctcccgtgctggactccgacggctccttcttcctctacagcaagctcaccgtggacaagagcaggtggcagcaggggaacgtcttctcatgctccgtgatgcacgaggctctgcacaaccactacacgcagaagagcctctccctgtctccgggtaaaatcgatccaaataaaggaagtggaaccacttcaggtactacccgtcttctatctgggcacacgtgtttcacgttgacaggtttgcttgggacgctagtaaccatgggcttgctgacttag

SEQ ID NO: 234 - protein, 488 aa, Artificial Sequence
  Description of Artificial Sequence: Synthetic polypeptide
MIFLLLMLSLELQLHQIAALFTVTVPKELYIIEHGSNVTLECNFDTGSHVNLGAITASLQKVENDTSPHRERATLLEEQLPLGKASFHIPQVQVRDEGQYQCIIIYGVAWDYKYLTLKVKASYRKINTHILKVPETDEVELTCQATGYPLAEVSWPNVSVPANTSHSRTPEGLYQVTSVLRLKPPPGRNFSCVFWNTHVRELTLASIDLQSQMEPRTHPTIDDKTHTCPPCPAPELLGGPSVFLFPPKPKDTLMISRTPEVTCVVVDVSHEDPEVKFNWYVDGVEVHNAKTKPREEQYNSTYRVVSVLTVLHQDWLNGKEYKCKVSNKALPAPIEKTISKAKGQPREPQVYTLPPSREEMTKNQVSLTCLVKGFYPSDIAVEWESNGQPENNYKTTPPVLDSDGSFFLYSKLTVDKSRWQQGNVFSCSVMHEALHNHYTQKSLSLSPGKIDPNKGSGTTSGTTRLLSGHTCFTLTGLLGTLVTMGLLT

SEQ ID NO: 235 - DNA, 930 bp, Artificial Sequence
  Description of Artificial Sequence: Synthetic polynucleotide
atgagccaggacaccgaggtggatatgaaggaggtggagctgaatgagttagagcccgagaagcagccgatgaacgcggcgtctggggcggccatgtccctggcgggagccgagaagaatggtctggtgaagatcaaggtggcggaagacgaggcggaggcggcagccgcggctaagttcacgggcctgtccaaggaggagctgctgaaggtggcaggcagccccggctgggtacgcacccgctgggcactgctgctgctcttctggctcggctggctcggcatgcttgctggtgccgtggtcataatcgtggcctgcccctgggccgtgtccggggctcgcgcctcgcccggctccgcggccagcccgagactccgcgagggtcccgagctttcgcccgacgatcccgccggcctcttggacctgcggcagggcatgtttgcgcagctggtggcccaaaatgttctgctgatcgatgggcccctgagctggtacagtgacccaggcctggcaggcgtgtccctgacggggggcctgagctacaaagaggacacgaaggagctggtggtggccaaggctggagtctactatgtcttctttcaactagagctgcggcgcgtggtggccggcgagggctcaggctccgtttcacttgcgctgcacctgcagccactgcgctctgctgctggggccgccgccctggctttgaccgtggacctgccacccgcctcctccgaggctcggaactcggccttcggtttccagggccgcttgctgcacctgagtgccggccagcgcctgggcgtccatcttcacactgaggccagggcacgccatgcctggcagcttacccagggcgccacagtcttgggactcttccgggtgacccccgaaatcccagccggactcccttcaccgaggtcggaataa

SEQ ID NO: 236 - protein, 309 aa, Artificial Sequence
  Description of Artificial Sequence: Synthetic polypeptide
MSQDTEVDMKEVELNELEPEKQPMNAASGAAMSLAGAEKNGLVKIKVAEDEAEAAAAAKFTGLSKEELLKVAGSPGWVRTRWALLLLFWLGWLGMLAGAVVIIVACPWAVSGARASPGSAASPRLREGPELSPDDPAGLLDLRQGMFAQLVAQNVLLIDGPLSWYSDPGLAGVSLTGGLSYKEDTKELVVAKAGVYYVFFQLELRRVVAGEGSGSVSLALHLQPLRSAAGAAALALTVDLPPASSEARNSAFGFQGRLLHLSAGQRLGVHLHTEARARHAWQLTQGATVLGLFRVTPEIPAGLPSPRSE

SEQ ID NO: 237 - DNA, 1515 bp, Artificial Sequence
  Description of Artificial Sequence: Synthetic polynucleotide
atgaggatatttgctgtctttatattcatgacctactggcatttgctgaacgcatttactgtcacggttcccaaggacctatatgtggtagagtatggtagcaatatgacaattgaatgcaaattcccagtagaaaaacaattagacctggctgcactaattgtctattgggaaatggaggataagaacattattcaatttgtgcatggagaggaagacctgaaggttcagcatagtagctacagacagagggcccggctgttgaaggaccagctctccctgggaaatgctgcacttcagatcacagatgtgaaattgcaggatgcaggggtgtaccgctgcatgatcagctatggtggtgccgactacaagcgaattactgtgaaagtcaatgccccatacaacaaaatcaaccaaagaattttggttgtggatccagtcacctctgaacatgaactgacatgtcaggctgagggctaccccaaggccgaagtcatctggacaagcagtgaccatcaagtcctgagtggtaagaccaccaccaccaattccaagagagaggagaagcttttcaatgtgaccagcacactgagaatcaacacaacaactaatgagattttctactgcacttttaggagattagatcctgaggaaaaccatacagctgaattggtcatcccagaactacctctggcacatcctccaaatgaaagggagtccaaatatggtcccccatgcccatcatgcccagcacctgagttcctggggggaccatcagtcttcctgttccccccaaaacccaaggacactctcatgatctcccggacccctgaggtcacgtgcgtggtggtggacgtgagccaggaagaccccgaggtccagttcaactggtacgtggatggcgtggaggtgcataatgccaagacaaagccgcgggaggagcagttcaacagcacgtaccgtgtggtcagggtcctcaccgtcctgcaccaggactggctgaacggtaaggagtacaagtgcaaggtctccaacaaaggcctcccgtcctccatcgagaaaaccatctccaaagccaaagggcagccccgagagccacaggtgtacaccctgcccccatcccaggaggagatgaccaagaaccaggtcagcctgacctgcctggtcaaaggcttctaccccagcgacatcgccgtggagtgggagagcaatgggcagccggaggacaactacaagaccacgcctcccgtgctggactccgacggctccttcttcctctacagcaggctaaccgtggacaagagcaggtggcaggaggggaatgtcttctcatgctccgtgatgcatgaggctctgcacaaccactacacacagaagagcctctccctgtctccgggtaaaccaaataaaggaagtggaaccacttcaggtactacccgtcttctatctgggcacacgtgtttcacgttgacaggtttgcttgggacgctagtaaccatgggcttgctgacttag

SEQ ID NO: 238 - protein, 504 aa, Artificial Sequence
  Description of Artificial Sequence: Synthetic polypeptide
MRIFAVFIFMTYWHLLNAFTVTVPKDLYVVEYGSNMTIECKFPVEKQLDLAALIVYWEMEDKNIIQFVHGEEDLKVQHSSYRQRARLLKDQLSLGNAALQITDVKLQDAGVYRCMISYGGADYKRITVKVNAPYNKINQRILVVDPVTSEHELTCQAEGYPKAEVIWTSSDHQVLSGKTTTTNSKREEKLFNVTSTLRINTTTNEIFYCTFRRLDPEENHTAELVIPELPLAHPPNERESKYGPPCPSCPAPEFLGGPSVFLFPPKPKDTLMISRTPEVTCVVVDVSQEDPEVQFNWYVDGVEVHNAKTKPREEQFNSTYRVVRVLTVLHQDWLNGKEYKCKVSNKGLPSSIEKTISKAKGQPREPQVYTLPPSQEEMTKNQVSLTCLVKGFYPSDIAVEWESNGQPEDNYKTTPPVLDSDGSFFLYSRLTVDKSRWQEGNVFSCSVMHEALHNHYTQKSLSLSPGKPNKGSGTTSGTTRLLSGHTCFTLTGLLGTLVTMGLLT

SEQ ID NO: 239 - DNA, 1941 bp, Artificial Sequence
  Description of Artificial Sequence: Synthetic polynucleotide
atgaggatatttgctgtctttatattcatgacctactggcatttgctgaacgcatttactgtcacggttcccaaggacctatatgtggtagagtatggtagcaatatgacaattgaatgcaaattcccagtagaaaaacaattagacctggctgcactaattgtctattgggaaatggaggataagaacattattcaatttgtgcatggagaggaagacctgaaggttcagcatagtagctacagacagagggcccggctgttgaaggaccagctctccctgggaaatgctgcacttcagatcacagatgtgaaattgcaggatgcaggggtgtaccgctgcatgatcagctatggtggtgccgactacaagcgaattactgtgaaagtcaatgccccatacaacaaaatcaaccaaagaattttggttgtggatccagtcacctctgaacatgaactgacatgtcaggctgagggctaccccaaggccgaagtcatctggacaagcagtgaccatcaagtcctgagtggtaagaccaccaccaccaattccaagagagaggagaagcttttcaatgtgaccagcacactgagaatcaacacaacaactaatgagattttctactgcacttttaggagattagatcctgaggaaaaccatacagctgaattggtcatcccagaactacctctggcacatcctccaaatgaaaggccaaataaaggaagtggaaccacttcaggtactacccgtcttctatctgggcacacgtgtttcacgttgacaggtttgcttgggacgctagtaaccatgggcttgctgactggaagcggagctactaacttcagcctgctgaagcaggctggcgacgtggaggagaaccctggacctatggcaaaggtgttcagtttcatccttgttaccaccgctctgacaatgggcagggaaatttcggcgctcgaggactgtgcccaggagcagatgcggctcagagcccaggtgcgcctgcttgagacccgggtcaaacagcaacaggtcaagatcaagcagcttttgcaggagaatgaagtccagttccttgataaaggagatgagaatactgtcattgatcttggaagcaagaggcagtatgcagattgttcagagattttcaatgatgggtataagctcagtggattttacaaaatcaaacctctccagagcccagcagaattttctgtttattgtgacatgtccgatggaggaggatggactgtaattcagagacgatctgatggcagtgaaaactttaacagaggatggaaagactatgaaaatggctttggaaattttgtccaaaaacatggtgaatattggctgggcaataaaaatcttcacttcttgaccactcaagaagactacactttaaaaatcgaccttgcagattttgaaaaaaatagccgttatgcacaatataagaatttcaaagttggagatgaaaagaatttctacgagttgaatattggggaatattctggaacagctggagattcccttgcggggaattttcatcctgaggtgcagtggtgggctagtcaccaaagaatgaaattcagcacgtgggacagagatcatgacaactatgaagggaactgcgcagaagaagatcagtctggctggtggtttaacaggtgtcactctgcaaacctgaatggtgtatactacagcggcccctacacggctaaaacagacaatgggattgtctggtacacctggcatgggtggtggtattctctgaaatctgtggttatgaaaattaggccaaatgattttattccaaatgtaattccaaataaaggaagtggaaccacttcaggtactacccgtcttctatctgggcacacgtgtttcacgttgacaggtttgcttgggacgctagtaaccatgggcttgctgacttag

SEQ ID NO: 240 - protein, 646 aa, Artificial Sequence
  Description of Artificial Sequence: Synthetic polypeptide
MRIFAVFIFMTYWHLLNAFTVTVPKDLYVVEYGSNMTIECKFPVEKQLDLAALIVYWEMEDKNIIQFVHGEEDLKVQHSSYRQRARLLKDQLSLGNAALQITDVKLQDAGVYRCMISYGGADYKRITVKVNAPYNKINQRILVVDPVTSEHELTCQAEGYPKAEVIWTSSDHQVLSGKTTTTNSKREEKLFNVTSTLRINTTTNEIFYCTFRRLDPEENHTAELVIPELPLAHPPNERPNKGSGTTSGTTRLLSGHTCFTLTGLLGTLVTMGLLTGSGATNFSLLKQAGDVEENPGPMAKVFSFILVTTALTMGREISALEDCAQEQMRLRAQVRLLETRVKQQQVKIKQLLQENEVQFLDKGDENTVIDLGSKRQYADCSEIFNDGYKLSGFYKIKPLQSPAEFSVYCDMSDGGGWTVIQRRSDGSENFNRGWKDYENGFGNFVQKHGEYWLGNKNLHFLTTQEDYTLKIDLADFEKNSRYAQYKNFKVGDEKNFYELNIGEYSGTAGDSLAGNFHPEVQWWASHQRMKFSTWDRDHDNYEGNCAEEDQSGWWFNRCHSANLNGVYYSGPYTAKTDNGIVWYTWHGWWYSLKSVVMKIRPNDFIPNVIPNKGSGTTSGTTRLLSGHTCFTLTGLLGTLVTMGLLT

SEQ ID NO: 241 - DNA, 729 bp, Artificial Sequence
  Description of Artificial Sequence: Synthetic polynucleotide
atgggttgctgtttctccaagaccggctcgagcggcgtgagcaagggcgaggcagtgatcaaggagttcatgcggttcaaggtgcacatggagggctccatgaacggccacgagttcgagatcgagggcgagggcgagggccgcccctacgagggcacccagaccgccaagctgaaggtgaccaagggtggccccctgcccttctcctgggacatcctgtcccctcagttcatgtacggctccagggccttcaccaagcaccccgccgacatccccgactactataagcagtccttccccgagggcttcaagtgggagcgcgtgatgaacttcgaggacggcggcgccgtgaccgtgacccaggacacctccctggaggacggcaccctgatctacaaggtgaagctccgcggcaccaacttccctcctgacggccccgtaatgcagaagaagacaatgggctgggaagcgtccaccgagcggttgtaccccgaggacggcgtgctgaagggcgacattaagatggccctgcgcctgaaggacggcggccgctacctggcggacttcaagaccacctacaaggccaagaagcccgtgcagatgcccggcgcctacaacgtcgaccgcaagttggacatcacctcccacaacgaggactacaccgtggtggaacagtacgaacgctccgagggccgccactccaccggcggcatggacgagctgtacaag

SEQ ID NO: 242 - protein, 243 aa, Artificial Sequence
  Description of Artificial Sequence: Synthetic polypeptide
MGCCFSKTGSSGVSKGEAVIKEFMRFKVHMEGSMNGHEFEIEGEGEGRPYEGTQTAKLKVTKGGPLPFSWDILSPQFMYGSRAFTKHPADIPDYYKQSFPEGFKWERVMNFEDGGAVTVTQDTSLEDGTLIYKVKLRGTNFPPDGPVMQKKTMGWEASTERLYPEDGVLKGDIKMALRLKDGGRYLADFKTTYKAKKPVQMPGAYNVDRKLDITSHNEDYTVVEQYERSEGRHSTGGMDELYK

SEQ ID NO: 243 - DNA, 549 bp, Artificial Sequence
  Description of Artificial Sequence: Synthetic polynucleotide
atgggttgctgtttctccaagaccggctcgagcggcgtcttcacactcgaagatttcgttggggactggcgacagacagccggctacaacctggaccaagtccttgaacagggaggtgtgtccagtttgtttcagaatctcggggtgtccgtaactccgatccaaaggattgtcctgagcggtgaaaatgggctgaagatcgacatccatgtcatcatcccgtatgaaggtctgagcggcgaccaaatgggccagatcgaaaaaatttttaaggtggtgtaccctgtggatgatcatcactttaaggtgatcctgcactatggcacactggtaatcgacggggttacgccgaacatgatcgactatttcggacggccgtatgaaggcatcgccgtgttcgacggcaaaaagatcactgtaacagggaccctgtggaacggcaacaaaattatcgacgagcgcctgatcaaccccgacggctccctgctgttccgagtaaccatcaacggagtgaccggctggcggctgtgcgaacgcattctggcgtaa

SEQ ID NO: 244 - protein, 182 aa, Artificial Sequence
  Description of Artificial Sequence: Synthetic polypeptide
MGCCFSKTGSSGVFTLEDFVGDWRQTAGYNLDQVLEQGGVSSLFQNLGVSVTPIQRIVLSGENGLKIDIHVIIPYEGLSGDQMGQIEKIFKVVYPVDDHHFKVILHYGTLVIDGVTPNMIDYFGRPYEGIAVFDGKKITVTGTLWNGNKIIDERLINPDGSLLFRVTINGVTGWRLCERILA

SEQ ID NO: 245 - DNA, 849 bp, Artificial Sequence
  Description of Artificial Sequence: Synthetic polynucleotide
atgaggatatttgctgtctttatattcatgacctactggcatttgctgaacgcatttactgtcacggttcccaaggacctatatgtggtagagtatggtagcaatatgacaattgaatgcaaattcccagtagaaaaacaattagacctggctgcactaattgtctattgggaaatggaggataagaacattattcaatttgtgcatggagaggaagacctgaaggttcagcatagtagctacagacagagggcccggctgttgaaggaccagctctccctgggaaatgctgcacttcagatcacagatgtgaaattgcaggatgcaggggtgtaccgctgcatgatcagctatggtggtgccgactacaagcgaattactgtgaaagtcaatgccccatacaacaaaatcaaccaaagaattttggttgtggatccagtcacctctgaacatgaactgacatgtcaggctgagggctaccccaaggccgaagtcatctggacaagcagtgaccatcaagtcctgagtggtaagaccaccaccaccaattccaagagagaggagaagcttttcaatgtgaccagcacactgagaatcaacacaacaactaatgagattttctactgcacttttaggagattagatcctgaggaaaaccatacagctgaattggtcatcccaggtaatattctgaatgtgtccattaaaatatgtctaacactgtcccctagcaccccaaataaaggaagtggaaccacttcaggtactacccgtcttctatctgggcacacgtgtttcacgttgacaggtttgcttgggacgctagtaaccatgggcttgctgacttag

SEQ ID NO: 246 - protein, 282 aa, Artificial Sequence
  Description of Artificial Sequence: Synthetic polypeptide
MRIFAVFIFMTYWHLLNAFTVTVPKDLYVVEYGSNMTIECKFPVEKQLDLAALIVYWEMEDKNIIQFVHGEEDLKVQHSSYRQRARLLKDQLSLGNAALQITDVKLQDAGVYRCMISYGGADYKRITVKVNAPYNKINQRILVVDPVTSEHELTCQAEGYPKAEVIWTSSDHQVLSGKTTTTNSKREEKLFNVTSTLRINTTTNEIFYCTFRRLDPEENHTAELVIPGNILNVSIKICLTLSPSTPNKGSGTTSGTTRLLSGHTCFTLTGLLGTLVTMGLLT

SEQ ID NO: 247 - DNA, 939 bp, Artificial Sequence
  Description of Artificial Sequence: Synthetic polynucleotide
atggagcggctttggggtctattccagagagcgcaacaactgtccccaagatcctctcagaccgtctaccagcgtgtggaaggcccccggaaagggcacctggaggaggaagaggaagacggggaggagggggcggagacattggcccacttctgccccatggagctgaggggccctgagcccctgggctctagacccaggcagccaaacctcattccctgggcggcagcaggacggagggctgccccctacctggtcctgacggccctgctgatcttcactggggccttcctactgggctacgtcgccttccgagggtccgcctgcccctgggccgtgtccggggctcgcgcctcgcccggctccgcggccagcccgagactccgcgagggtcccgagctttcgcccgacgatcccgccggcctcttggacctgcggcagggcatgtttgcgcagctggtggcccaaaatgttctgctgatcgatgggcccctgagctggtacagtgacccaggcctggcaggcgtgtccctgacggggggcctgagctacaaagaggacacgaaggagctggtggtggccaaggctggagtctactatgtcttctttcaactagagctgcggcgcgtggtggccggcgagggctcaggctccgtttcacttgcgctgcacctgcagccactgcgctctgctgctggggccgccgccctggctttgaccgtggacctgccacccgcctcctccgaggctcggaactcggccttcggtttccagggccgcttgctgcacctgagtgccggccagcgcctgggcgtccatcttcacactgaggccagggcacgccatgcctggcagcttacccagggcgccacagtcttgggactcttccgggtgacccccgaaatcccagccggactcccttcaccgaggtcggaataa

SEQ ID NO: 248 - protein, 311 aa, Artificial Sequence
  Description of Artificial Sequence: Synthetic polypeptide
MERLWGLFQRAQQLSPRSSQTVYQRVEGPRKGHLEEEEEDGEEGAETLAHFCPMELRGPEPLGSRPRQPNLIPWAAAGRRAAPYLVLTALLIFTGAFLLGYVAFRGSACPWAVSGARASPGSAASPRLRGPELSPDDPAGLLDLRQGMFAQLVAQNVLLIDGPLSWYSDPGLAGVSLTGGLSYKEDTKELVVAKAGVYYVFFQLELRRVVAGEGSGSVSLALHLQPLRSAAGAAALALTVDLPPASSEARNSAFGFQGRLLHLSAGQRLGVHLHTEARARHAWQLTQGATVLGLFRVTPEIPAGLPSPRSE

SEQ ID NO: 249 - DNA, 741 bp, Artificial Sequence
  Description of Artificial Sequence: Synthetic polynucleotide
atgggctgctgcggggctgtgcaggagtcccagtgcatgctgggactgttcttcggcttcctcttggtgatattcgccattgaaatagctgcggccatctggggatattcccacaaggatgaggcctgcccctgggccgtgtccggggctcgcgcctcgcccggctccgcggccagcccgagactccgcgagggtcccgagctttcgcccgacgatcccgccggcctcttggacctgcggcagggcatgtttgcgcagctggtggcccaaaatgttctgctgatcgatgggcccctgagctggtacagtgacccaggcctggcaggcgtgtccctgacggggggcctgagctacaaagaggacacgaaggagctggtggtggccaaggctggagtctactatgtcttctttcaactagagctgcggcgcgtggtggccggcgagggctcaggctccgtttcacttgcgctgcacctgcagccactgcgctctgctgctggggccgccgccctggctttgaccgtggacctgccacccgcctcctccgaggctcggaactcggccttcggtttccagggccgcttgctgcacctgagtgccggccagcgcctgggcgtccatcttcacactgaggccagggcacgccatgcctggcagcttacccagggcgccacagtcttgggactcttccgggtgacccccgaaatcccagccggactcccttcaccgaggtcggaataa

SEQ ID NO: 250 - protein, 246 aa, Artificial Sequence
  Description of Artificial Sequence: Synthetic polypeptide
MGCCGAVQESQCMLGLFFGFLLVIFAIEIAAAIWGYSHKDEACPWAVSGARASPGSAASPRLREGPELSPDDPAGLLDLRQGMFAQLVAQNVLLIDGPLSWYSDPGLAGVSLTGGLSYKEDTKELVVAKAGVYYVFFQLELRRVVAGEGSGSVSLALHLQPLRSAAGAAALALTVDLPPASSEARNSAFGFQGRLLHLSAGQRLGVHLHTEARARHAWQLTQGATVLGLFRVTPEIPAGLPSPRSE

SEQ ID NO: 251 - DNA, 963 bp, Artificial Sequence
  Description of Artificial Sequence: Synthetic polynucleotide
atgggttgctgtttctccaagaccggctcgagcggcagccaggacaccgaggtggatatgaaggaggtggagctgaatgagttagagcccgagaagcagccgatgaacgcggcgtctggggcggccatgtccctggcgggagccgagaagaatggtctggtgaagatcaaggtggcggaagacgaggcggaggcggcagccgcggctaagttcacgggcctgtccaaggaggagctgctgaaggtggcaggcagccccggctgggtacgcacccgctgggcactgctgctgctcttctggctcggctggctcggcatgcttgctggtgccgtggtcataatcgtggcctgcccctgggccgtgtccggggctcgcgcctcgcccggctccgcggccagcccgagactccgcgagggtcccgagctttcgcccgacgatcccgccggcctcttggacctgcggcagggcatgtttgcgcagctggtggcccaaaatgttctgctgatcgatgggcccctgagctggtacagtgacccaggcctggcaggcgtgtccctgacggggggcctgagctacaaagaggacacgaaggagctggtggtggccaaggctggagtctactatgtcttctttcaactagagctgcggcgcgtggtggccggcgagggctcaggctccgtttcacttgcgctgcacctgcagccactgcgctctgctgctggggccgccgccctggctttgaccgtggacctgccacccgcctcctccgaggctcggaactcggccttcggtttccagggccgcttgctgcacctgagtgccggccagcgcctgggcgtccatcttcacactgaggccagggcacgccatgcctggcagcttacccagggcgccacagtcttgggactcttccgggtgacccccgaaatcccagccggactcccttcaccgaggtcggaataa

SEQ ID NO: 252 - protein, 320 aa, Artificial Sequence
  Description of Artificial Sequence: Synthetic polypeptide
MGCCFSKTGSSGSQDTEVDMKEVELNELEPEKQPMNAASGAAMSLAGAEKNGLVKIKVAEDEAEAAAAAKFTGLSKEELLKVAGSPGWVRTRWALLLLFWLGWLGMLAGAVVIIVACPWAVSGARASPGSAASPRLREGPELSPDDPAGLLDLRQGMFAQLVAQNVLLIDGPLSWYSDPGLAGVSLTGGLSYKEDTKELVVAKAGVYYVFFQLELRRVVAGEGSGSVSLALHLQPLRSAAGAAALALTVDLPPASSEARNSAFGFQGRLLHLSAGQRLGVHLHTEARARHAWQLTQGATVLGLFRVTPEIPAGLPSPRSE

SEQ ID NO: 253 - DNA, 717 bp, Artificial Sequence
  Description of Artificial Sequence: Synthetic polynucleotide
atgggttgctgtttctccaagaccggctcgagcggctgggccctggtcgcggggctgctgctgctgctgctgctcgctgccgcctgcgccgtcttcctcgcctgcccctgggccgtgtccggggctcgcgcctcgcccggctccgcggccagcccgagactccgcgagggtcccgagctttcgcccgacgatcccgccggcctcttggacctgcggcagggcatgtttgcgcagctggtggcccaaaatgttctgctgatcgatgggcccctgagctggtacagtgacccaggcctggcaggcgtgtccctgacggggggcctgagctacaaagaggacacgaaggagctggtggtggccaaggctggagtctactatgtcttctttcaactagagctgcggcgcgtggtggccggcgagggctcaggctccgtttcacttgcgctgcacctgcagccactgcgctctgctgctggggccgccgccctggctttgaccgtggacctgccacccgcctcctccgaggctcggaactcggccttcggtttccagggccgcttgctgcacctgagtgccggccagcgcctgggcgtccatcttcacactgaggccagggcacgccatgcctggcagcttacccagggcgccacagtcttgggactcttccgggtgacccccgaaatcccagccggactcccttcaccgaggtcggaataa

SEQ ID NO: 254 - protein, 238 aa, Artificial Sequence
  Description of Artificial Sequence: Synthetic polypeptide
MGCCFSKTGSSGWALVAGLLLLLLLAAACAVFLACPWAVSGARASPGSAASPRLREGPELSPDDPAGLLDLRQGMFAQLVAQNVLLIDGPLSWYSDPGLAGVSLTGGLSYKEDTKELVVAKAGVYYVFFQLELRRVVAGEGSGSVSLALHLQPLRSAAGAAALALTVDLPPASSEARNSAFGFQGRLLHLSAGQRLGVHLHTEARARHAWQLTQGATVLGLFRVTPEIPAGLPSPRSE

SEQ ID NO: 255 - DNA, 798 bp, Artificial Sequence
  Description of Artificial Sequence: Synthetic polynucleotide
atgaggatatttgctgtctttatattcatgacctactggcatttgctgaacgcatttactgtcacggttcccaaggacctatatgtggtagagtatggtagcaatatgacaattgaatgcaaattcccagtagaaaaacaattagacctggctgcactaattgtctattgggaaatggaggataagaacattattcaatttgtgcatggagaggaagacctgaaggttcagcatagtagctacagacagagggcccggctgttgaaggaccagctctccctgggaaatgctgcacttcagatcacagatgtgaaattgcaggatgcaggggtgtaccgctgcatgatcagctatggtggtgccgactacaagcgaattactgtgaaagtcaatgccccatacaacaaaatcaaccaaagaattttggttgtggatccagtcacctctgaacatgaactgacatgtcaggctgagggctaccccaaggccgaagtcatctggacaagcagtgaccatcaagtcctgagtggtaagaccaccaccaccaattccaagagagaggagaagcttttcaatgtgaccagcacactgagaatcaacacaacaactaatgagattttctactgcacttttaggagattagatcctgaggaaaaccatacagctgaattgggctcgagcggcccaaataaaggaagtggaaccacttcaggtactacccgtcttctatctgggcacacgtgtttcacgttgacaggtttgcttgggacgctagtaaccatgggcttgctgacttag

SEQ ID NO: 256 - protein, 265 aa, Artificial Sequence
  Description of Artificial Sequence: Synthetic polypeptide
MRIFAVFIFMTYWHLLNAFTVTVPKDLYVVEYGSNMTIECKFPVEKQLDLAALIVYWEMEDKNIIQFVHGEEDLKVQHSSYRQRARLLKDQLSLGNAALQITDVKLQDAGVYRCMISYGGADYKRITVKVNAPYNKINQRILVVDPVTSEHELTCQAEGYPKAEVIWTSSDHQVLSGKTTTTNSKREEKLFNVTSTLRINTTTNEIFYCTFRRLDPEENHTAELGSSGPNKGSGTTSGTTRLLSGHTCFTLTGLLGTLVTMGLLT

SEQ ID NO: 257 - DNA, 834 bp, Artificial Sequence
  Description of Artificial Sequence: Synthetic polynucleotide
atgaggatatttgctgtctttatattcatgacctactggcatttgctgaacgcatttactgtcacggttcccaaggacctatatgtggtagagtatggtagcaatatgacaattgaatgcaaattcccagtagaaaaacaattagacctggctgcactaattgtctattgggaaatggaggataagaacattattcaatttgtgcatggagaggaagacctgaaggttcagcatagtagctacagacagagggcccggctgttgaaggaccagctctccctgggaaatgctgcacttcagatcacagatgtgaaattgcaggatgcaggggtgtaccgctgcatgatcagctatggtggtgccgactacaagcgaattactgtgaaagtcaatgccccatacaacaaaatcaaccaaagaattttggttgtggatccagtcacctctgaacatgaactgacatgtcaggctgagggctaccccaaggccgaagtcatctggacaagcagtgaccatcaagtcctgagtggtaagaccaccaccaccaattccaagagagaggagaagcttttcaatgtgaccagcacactgagaatcaacacaacaactaatgagattttctactgcacttttaggagattagatcctgaggaaaaccatacagctgaattggtcatcccaggtaatattctgaatgtgtccattaaaatatgtctaacactgtcccctagcaccttctacacaggagtctatattctgatcggagccggcgccctcatgatgctggtgggcttcctgggctgctgcggggctgtgcaggagtcccagtgctag

SEQ ID NO: 258 - protein, 277 aa, Artificial Sequence
  Description of Artificial Sequence: Synthetic polypeptide
MRIFAVFIFMTYWHLLNAFTVTVPKDLYVVEYGSNMTIECKFPVEKQLDLAALIVYWEMEDKNIIQFVHGEEDLKVQHSSYRQRARLLKDQLSLGNAALQITDVKLQDAGVYRCMISYGGADYKRITVKVNAPYNKINQRILVVDPVTSEHELTCQAEGYPKAEVIWTSSDHQVLSGKTTTTNSKREEKLFNVTSTLRINTTTNEIFYCTFRRLDPEENHTAELVIPGNILNVSIKICLTLSPSTFYTGVYILIGAGALMMLVGFLGCCGAVQESQC

SEQ ID NO: 259 - DNA, 876 bp, Artificial Sequence
  Description of Artificial Sequence: Synthetic polynucleotide
atgaggatatttgctgtctttatattcatgacctactggcatttgctgaacgcatttactgtcacggttcccaaggacctatatgtggtagagtatggtagcaatatgacaattgaatgcaaattcccagtagaaaaacaattagacctggctgcactaattgtctattgggaaatggaggataagaacattattcaatttgtgcatggagaggaagacctgaaggttcagcatagtagctacagacagagggcccggctgttgaaggaccagctctccctgggaaatgctgcacttcagatcacagatgtgaaattgcaggatgcaggggtgtaccgctgcatgatcagctatggtggtgccgactacaagcgaattactgtgaaagtcaatgccccatacaacaaaatcaaccaaagaattttggttgtggatccagtcacctctgaacatgaactgacatgtcaggctgagggctaccccaaggccgaagtcatctggacaagcagtgaccatcaagtcctgagtggtaagaccaccaccaccaattccaagagagaggagaagcttttcaatgtgaccagcacactgagaatcaacacaacaactaatgagattttctactgcacttttaggagattagatcctgaggaaaaccatacagctgaattggtcatcccaggtaatattctgaatgtgtccattaaaatatgtctaacactgtcccctagcaccttctacacaggagtctatattctgatcggagccggcgccctcatgatgctggtgggcttcctgggctgctgcggggctgtgcaggagtcccagtgcaaaaagaagaaaaagaagtcaaagacaaagtgtgtaattatgtaa

SEQ ID NO: 260 - protein, 291 aa, Artificial Sequence
  Description of Artificial Sequence: Synthetic polypeptide
MRIFAVFIFMTYWHLLNAFTVTVPKDLYVVEYGSNMTIECKFPVEKQLDLAALIVYWEMEDKNIIQFVHGEEDLKVQHSSYRQRARLLKDQLSLGNAALQITDVKLQDAGVYRCMISYGGADYKRITVKVNAPYNKINQRILVVDPVTSEHELTCQAEGYPKAEVIWTSSDHQVLSGKTTTTNSKREEKLFNVTSTLRINTTTNEIFYCTFRRLDPEENHTAELVIPGNILNVSIKICLTLSPSTFYTGVYILIGAGALMMLVGFLGCCGAVQESQCKKKKKKSKTKCVIM

SEQ ID NO: 261 - DNA, 837 bp, Artificial Sequence
  Description of Artificial Sequence: Synthetic polynucleotide
atgaggatatttgctgtctttatattcatgacctactggcatttgctgaacgcatttactgtcacggttcccaaggacctatatgtggtagagtatggtagcaatatgacaattgaatgcaaattcccagtagaaaaacaattagacctggctgcactaattgtctattgggaaatggaggataagaacattattcaatttgtgcatggagaggaagacctgaaggttcagcatagtagctacagacagagggcccggctgttgaaggaccagctctccctgggaaatgctgcacttcagatcacagatgtgaaattgcaggatgcaggggtgtaccgctgcatgatcagctatggtggtgccgactacaagcgaattactgtgaaagtcaatgccccatacaacaaaatcaaccaaagaattttggttgtggatccagtcacctctgaacatgaactgacatgtcaggctgagggctaccccaaggccgaagtcatctggacaagcagtgaccatcaagtcctgagtggtaagaccaccaccaccaattccaagagagaggagaagcttttcaatgtgaccagcacactgagaatcaacacaacaactaatgagattttctactgcacttttaggagattagatcctgaggaaaaccatacagctgaattggtcatcccaggtaatattctgaatgtgtccattaaaatatgtctaacactgtcccctagcaccatcggcgcagtgggcatcggcattgccgtggtcatgatatttggcatgatcttcagtatgatcttgtgctgtgctatccgcaggaaccgcgagatggtctag

SEQ ID NO: 262 - protein, 278 aa, Artificial Sequence
  Description of Artificial Sequence: Synthetic polypeptide
MRIFAVFIFMTYWHLLNAFTVTVPKDLYVVEYGSNMTIECKFPVEKQLDLAALIVYWEMEDKNIIQFVHGEEDLKVQHSSYRQRARLLKDQLSLGNAALQITDVKLQDAGVYRCMISYGGADYKRITVKVNAPYNKINQRILVVDPVTSEHELTCQAEGYPKAEVIWTSSDHQVLSGKTTTTNSKREEKLFNVTSTLRINTTTNEIFYCTFRRLDPEENHTAELVIPGNILNVSIKICLTLSPSTIGAVGIGIAVVMIFGMIFSMILCCAIRRNREMV

SEQ ID NO: 263 - DNA, 843 bp, Artificial Sequence
  Description of Artificial Sequence: Synthetic polynucleotide
atgaggatatttgctgtctttatattcatgacctactggcatttgctgaacgcatttactgtcacggttcccaaggacctatatgtggtagagtatggtagcaatatgacaattgaatgcaaattcccagtagaaaaacaattagacctggctgcactaattgtctattgggaaatggaggataagaacattattcaatttgtgcatggagaggaagacctgaaggttcagcatagtagctacagacagagggcccggctgttgaaggaccagctctccctgggaaatgctgcacttcagatcacagatgtgaaattgcaggatgcaggggtgtaccgctgcatgatcagctatggtggtgccgactacaagcgaattactgtgaaagtcaatgccccatacaacaaaatcaaccaaagaattttggttgtggatccagtcacctctgaacatgaactgacatgtcaggctgagggctaccccaaggccgaagtcatctggacaagcagtgaccatcaagtcctgagtggtaagaccaccaccaccaattccaagagagaggagaagcttttcaatgtgaccagcacactgagaatcaacacaacaactaatgagattttctactgcacttttaggagattagatcctgaggaaaaccatacagctgaattggtcatcccaggtaatattctgaatgtgtccattaaaatatgtctaacactgtcccctagcaccctgtacctcatcggcattgctgccatcgtggtcgctgtgatcatgatcttcgagatgatcctgagcatggtgctgtgctgtggcatccggaacagctccgtgtactga

SEQ ID NO: 264 - protein, 280 aa, Artificial Sequence
  Description of Artificial Sequence: Synthetic polypeptide
MRIFAVFIFMTYWHLLNAFTVTVPKDLYVVEYGSNMTIECKFPVEKQLDLAALIVYWEMEDKNIIQFVHGEEDLKVQHSSYRQRARLLKDQLSLGNAALQITDVKLQDAGVYRCMISYGGADYKRITVKVNAPYNKINQRILVVDPVTSEHELTCQAEGYPKAEVIWTSSDHQVLSGKTTTTNSKREEKLFNVTSTLRINTTTNEIFYCTFRRLDPEENHTAELVIPGNILNVSIKICLTLSPSTLYLIGIAAIVVAVIMIFEMILSMVLCCGIRNSSVY

SEQ ID NO: 265 - DNA, 1503 bp, Artificial Sequence
  Description of Artificial Sequence: Synthetic polynucleotide
atggagaggctggtgatcaggatgcccttctctcatctgtctacctacagcctggtttgggtcatggcagcagtggtgctgtgcacagcacaagtgcaagtggtgacccaggatgaaagagagcagctgtacacacctgcttccttaaaatgctctctgcaaaatgcccaggaagccctcattgtgacatggcagaaaaagaaagctgtaagcccagaaaacatggtcaccttcagcgagaaccatggggtggtgatccagcctgcctataaggacaagataaacattacccagctgggactccaaaactcaaccatcaccttctggaatatcaccctggaggatgaagggtgttacatgtgtctcttcaatacctttggttttgggaagatctcaggaacggcctgcctcaccgtctatgtacagcccatagtatcccttcactacaaattctctgaagaccacctaaatatcacttgctctgccactgcccgcccagcccccatggtcttctggaaggtccctcggtcagggattgaaaatagtacagtgactctgtctcacccaaatgggaccacgtctgttaccagcatcctccatatcaaagaccctaagaatcaggtggggaaggaggtgatctgccaggtgctgcacctggggactgtgaccgactttaagcaaaccgtcaacaaaggcatcgatgacaaaactcacacatgcccaccgtgcccagcacctgaactcctggggggaccgtcagtcttcctcttccccccaaaacccaaggacaccctcatgatctcccggacccctgaggtcacatgcgtggtggtggacgtgagccacgaagaccctgaggtcaagttcaactggtacgtggacggcgtggaggtgcataatgccaagacaaagccgcgggaggagcagtacaacagcacgtaccgtgtggtcagcgtcctcaccgtcctgcaccaggactggctgaatggcaaggagtacaagtgcaaggtctccaacaaagccctcccagcccccatcgagaaaaccatctccaaagccaaagggcagccccgagaaccacaggtgtacaccctgcccccatcccgggaggagatgaccaagaaccaggtcagcctgacctgcctggtcaaaggcttctatcccagcgacatcgccgtggagtgggagagcaatgggcagccggagaacaactacaagaccacgcctcccgtgctggactccgacggctccttcttcctctacagcaagctcaccgtggacaagagcaggtggcagcaggggaacgtcttctcatgctccgtgatgcacgaggctctgcacaaccactacacgcagaagagcctctccctgtctccgggtaaaatcgatccaaataaaggaagtggaaccacttcaggtactacccgtcttctatctgggcacacgtgtttcacgttgacaggtttgcttgggacgctagtaaccatgggcttgctgacttag

SEQ ID NO: 266 - protein, 500 aa, Artificial Sequence
  Description of Artificial Sequence: Synthetic polypeptide
MERLVIRMPFSHLSTYSLVWVMAAVVLCTAQVQVVTQDEREQLYTPASLKCSLQNAQEALIVTWQKKKAVSPENMVTFSENHGVVIQPAYKDKINITQLGLQNSTITFWNITLEDEGCYMCLFNTFGFGKISGTACLTVYVQPIVSLHYKFSEDHLNITCSATARPAPMVFWKVPRSGIENSTVTLSHPNGTTSVTSILHIKDPKNQVGKEVICQVLHLGTVTDFKQTVNKGIDDKTHTCPPCPAPELLGGPSVFLFPPKPKDTLMISRTPEVTCVVVDVSHEDPEVKFNWYVDGVEVHNAKTKPREEQYNSTYRVVSVLTVLHQDWLNGKEYKCKVSNKALPAPIEKTISKAKGQPREPQVYTLPPSREEMTKNQVSLTCLVKGFYPSDIAVEWESNGQPENNYKTTPPVLDSDGSFFLYSKLTVDKSRWQQGNVFSCSVMHEALHNHYTQKSLSLSPGKIDPNKGSGTTSGTTRLLSGHTCFTLTGLLGTLVTMGLLT

SEQ ID NO: 267 - DNA, 1050 bp, Artificial Sequence
  Description of Artificial Sequence: Synthetic polynucleotide
atggcaaaggtgttcagtttcatccttgttaccaccgctctgacaatgggcagggaaatttcggcgctcgaggactgtgcccaggagcagatgcggctcagagcccaggtgcgcctgcttgagacccgggtcaaacagcaacaggtcaagatcaagcagcttttgcaggagaatgaagtccagttccttgataaaggagatgagaatactgtcattgatcttggaagcaagaggcagtatgcagattgttcagagattttcaatgatgggtataagctcagtggattttacaaaatcaaacctctccagagcccagcagaattttctgtttattgtgacatgtccgatggaggaggatggactgtaattcagagacgatctgatggcagtgaaaactttaacagaggatggaaagactatgaaaatggctttggaaattttgtccaaaaacatggtgaatattggctgggcaataaaaatcttcacttcttgaccactcaagaagactacactttaaaaatcgaccttgcagattttgaaaaaaatagccgttatgcacaatataagaatttcaaagttggagatgaaaagaatttctacgagttgaatattggggaatattctggaacagctggagattcccttgcggggaattttcatcctgaggtgcagtggtgggctagtcaccaaagaatgaaattcagcacgtgggacagagatcatgacaactatgaagggaactgcgcagaagaagatcagtctggctggtggtttaacaggtgtcactctgcaaacctgaatggtgtatactacagcggcccctacacggctaaaacagacaatgggattgtctggtacacctggcatgggtggtggtattctctgaaatctgtggttatgaaaattaggccaaatgattttattccaaatgtaattccaaataaaggaagtggaaccacttcaggtactacccgtcttctatctgggcacacgtgtttcacgttgacaggtttgcttgggacgctagtaaccatgggcttgctgacttag

SEQ ID NO: 268 - protein, 349 aa, Artificial Sequence
  Description of Artificial Sequence: Synthetic polypeptide
MAKVFSFILVTTALTMGREISALEDCAQEQMRLRAQVRLLETRVKQQQVKIKQLLQENEVQFLDKGDENTVIDLGSKRQYADCSEIFNDGYKLSGFYKIKPLQSPAEFSVYCDMSDGGGWTVIQRRSDGSENFNRGWKDYENGFGNFVQKHGEYWLGNKNLHFLTTQEDYTLKIDLADFEKNSRYAQYKNFKVGDEKNFYELNIGEYSGTAGDSLAGNFHPEVQWWASHQRMKFSTWDRDHDNYEGNCAEEDQSGWWFNRCHSANLNGVYYSGPYTAKTDNGIVWYTWHGWWYSLKSVVMKIRPNDFIPNVIPNKGSGTTSGTTRLLSGHTCFTLTGLLGTLVTMGLLT

SEQ ID NO: 269 - DNA, 1872 bp, Artificial Sequence
  Description of Artificial Sequence: Synthetic polynucleotide
atggccttcagcggttcccaggctccctacctgagtccagctgtccccttttctgggactattcaaggaggtctccaggacggacttcagatcactgtcaatgggaccgttctcagctccagtggaaccaggtttgctgtgaactttcagactggcttcagtggaaatgacattgccttccacttcaaccctcggtttgaagatggagggtacgtggtgtgcaacacgaggcagaacggaagctgggggcccgaggagaggaagacacacatgcctttccagaaggggatgccctttgacctctgcttcctggtgcagagctcagatttcaaggtgatggtgaacgggatcctcttcgtgcagtacttccaccgcgtgcccttccaccgtgtggacaccatctccgtcaatggctctgtgcagctgtcctacatcagcttccagaacccccgcacagtccctgttcagcctgccttctccacggtgccgttctcccagcctgtctgtttcccacccaggcccagggggcgcagacaaaaacctcccggcgtgtggcctgccaacccggctcccattacccagacagtcatccacacagtgcagagcgcccctggacagatgttctctactcccgccatcccacctatgatgtacccccaccccgcctatccgatgcctttcatcaccaccattctgggagggctgtacccatccaagtccatcctcctgtcaggcactgtcctgcccagtgctcagaggttccacatcaacctgtgctctgggaaccacatcgccttccacctgaacccccgttttgatgagaatgctgtggtccgcaacacccagatcgacaactcctgggggtctgaggagcgaagtctgccccgaaaaatgcccttcgtccgtggccagagcttctcagtgtggatcttgtgtgaagctcactgcctcaaggtggccgtggatggtcagcacctgtttgaatactaccatcgcctgaggaacctgcccaccatcaacagactggaagtggggggcgacatccagctgacccatgtgcagacaatcgatgacaaaactcacacatgcccaccgtgcccagcacctgaactcctggggggaccgtcagtcttcctcttccccccaaaacccaaggacaccctcatgatctcccggacccctgaggtcacatgcgtggtggtggacgtgagccacgaagaccctgaggtcaagttcaactggtacgtggacggcgtggaggtgcataatgccaagacaaagccgcgggaggagcagtacaacagcacgtaccgtgtggtcagcgtcctcaccgtcctgcaccaggactggctgaatggcaaggagtacaagtgcaaggtctccaacaaagccctcccagcccccatcgagaaaaccatctccaaagccaaagggcagccccgagaaccacaggtgtacaccctgcccccatcccgggaggagatgaccaagaaccaggtcagcctgacctgcctggtcaaaggcttctatcccagcgacatcgccgtggagtgggagagcaatgggcagccggagaacaactacaagaccacgcctcccgtgctggactccgacggctccttcttcctctacagcaagctcaccgtggacaagagcaggtggcagcaggggaacgtcttctcatgctccgtgatgcacgaggctctgcacaaccactacacgcagaagagcctctccctgtctccgggtaaaatcgatccaaataaaggaagtggaaccacttcaggtactacccgtcttctatctgggcacacgtgtttcacgttgacaggtttgcttgggacgctagtaaccatgggcttgctgacttag

SEQ ID NO: 270 - protein, 623 aa, Artificial Sequence
  Description of Artificial Sequence: Synthetic polypeptide
MAFSGSQAPYLSPAVPFSGTIQGGLQDGLQITVNGTVLSSSGTRFAVNFQTGFSGNDIAFHFNPRFEDGGYVVCNTRQNGSWGPEERKTHMPFQKGMPFDLCFLVQSSDFKVMVNGILFVQYFHRVPFHRVDTISVNGSVQLSYISFQNPRTVPVQPAFSTVPFSQPVCFPPRPRGRRQKPPGVWPANPAPITQTVIHTVQSAPGQMFSTPAIPPMMYPHPAYPMPFITTILGGLYPSKSILLSGTVLPSAQRFHINLCSGNHIAFHLNPRFDENAVVRNTQIDNSWGSEERSLPRKMPFVRGQSFSVWILCEAHCLKVAVDGQHLFEYYHRLRNLPTINRLEVGGDIQLTHVQTIDDKTHTCPPCPAPELLGGPSVFLFPPKPKDTLMISRTPEVTCVVVDVSHEDPEVKFNWYVDGVEVHNAKTKPREEQYNSTYRVVSVLTVLHQDWLNGKEYKCKVSNKALPAPIEKTISKAKGQPREPQVYTLPPSREEMTKNQVSLTCLVKGFYPSDIAVEWESNGQPENNYKTTPPVLDSDGSFFLYSKLTVDKSRWQQGNVFSCSVMHEALHNHYTQKSLSLSPGKIDPNKGSGTTSGTTRLLSGHTCFTLTGLLGTLVTMGLLT

SEQ ID NO: 271 - DNA, 810 bp, Artificial Sequence
  Description of Artificial Sequence: Synthetic polynucleotide
atggagaggctggtgatcaggatgcccttctctcatctgtctacctacagcctggtttgggtcatggcagcagtggtgctgtgcacagcacaagtgcaagtggtgacccaggatgaaagagagcagctgtacacacctgcttccttaaaatgctctctgcaaaatgcccaggaagccctcattgtgacatggcagaaaaagaaagctgtaagcccagaaaacatggtcaccttcagcgagaaccatggggtggtgatccagcctgcctataaggacaagataaacattacccagctgggactccaaaactcaaccatcaccttctggaatatcaccctggaggatgaagggtgttacatgtgtctcttcaatacctttggttttgggaagatctcaggaacggcctgcctcaccgtctatgtacagcccatagtatcccttcactacaaattctctgaagaccacctaaatatcacttgctctgccactgcccgcccagcccccatggtcttctggaaggtccctcggtcagggattgaaaatagtacagtgactctgtctcacccaaatgggaccacgtctgttaccagcatcctccatatcaaagaccctaagaatcaggtggggaaggaggtgatctgccaggtgctgcacctggggactgtgaccgactttaagcaaaccgtcaacaaaggcccaaataaaggaagtggaaccacttcaggtactacccgtcttctatctgggcacacgtgtttcacgttgacaggtttgcttgggacgctagtaaccatgggcttgctgacttag

SEQ ID NO: 272 - protein, 269 aa, Artificial Sequence
  Description of Artificial Sequence: Synthetic polypeptide
MERLVIRMPFSHLSTYSLVWVMAAVVLCTAQVQVVTQDEREQLYTPASLKCSLQNAQEALIVTWQKKKAVSPENMVTFSENHGVVIQPAYKDKINITQLGLQNSTITFWNITLEDEGCYMCLFNTFGFGKISGTACLTVYVQPIVSLHYKFSEDHLNITCSATARPAPMVFWKVPRSGIENSTVTLSHPNGTTSVTSILHIKDPKNQVGKEVICQVLHLGTVTDFKQTVNKGPNKGSGTTSGTTRLLSGHTCFTLTGLLGTLVTMGLLT

SEQ ID NO: 273 - DNA, 1179 bp, Artificial Sequence
  Description of Artificial Sequence: Synthetic polynucleotide
atggccttcagcggttcccaggctccctacctgagtccagctgtccccttttctgggactattcaaggaggtctccaggacggacttcagatcactgtcaatgggaccgttctcagctccagtggaaccaggtttgctgtgaactttcagactggcttcagtggaaatgacattgccttccacttcaaccctcggtttgaagatggagggtacgtggtgtgcaacacgaggcagaacggaagctgggggcccgaggagaggaagacacacatgcctttccagaaggggatgccctttgacctctgcttcctggtgcagagctcagatttcaaggtgatggtgaacgggatcctcttcgtgcagtacttccaccgcgtgcccttccaccgtgtggacaccatctccgtcaatggctctgtgcagctgtcctacatcagcttccagaacccccgcacagtccctgttcagcctgccttctccacggtgccgttctcccagcctgtctgtttcccacccaggcccagggggcgcagacaaaaacctcccggcgtgtggcctgccaacccggctcccattacccagacagtcatccacacagtgcagagcgcccctggacagatgttctctactcccgccatcccacctatgatgtacccccaccccgcctatccgatgcctttcatcaccaccattctgggagggctgtacccatccaagtccatcctcctgtcaggcactgtcctgcccagtgctcagaggttccacatcaacctgtgctctgggaaccacatcgccttccacctgaacccccgttttgatgagaatgctgtggtccgcaacacccagatcgacaactcctgggggtctgaggagcgaagtctgccccgaaaaatgcccttcgtccgtggccagagcttctcagtgtggatcttgtgtgaagctcactgcctcaaggtggccgtggatggtcagcacctgtttgaatactaccatcgcctgaggaacctgcccaccatcaacagactggaagtggggggcgacatccagctgacccatgtgcagacaccaaataaaggaagtggaaccacttcaggtactacccgtcttctatctgggcacacgtgtttcacgttgacaggtttgcttgggacgctagtaaccatgggcttgctgacttag

SEQ ID NO: 274 - protein, 392 aa, Artificial Sequence
  Description of Artificial Sequence: Synthetic polypeptide
MAFSGSQAPYLSPAVPFSGTIQGGLQDGLQITVNGTVLSSSGTRFAVNFQTGFSGNDIAFHFNPRFEDGGYVVCNTRQNGSWGPEERKTHMPFQKGMPFDLCFLVQSSDFKVMVNGILFVQYFHRVPFHRVDTISVNGSVQLSYISFQNPRTVPVQPAFSTVPFSQPVCFPPRPRGRRQKPPGVWPANPAPITQTVIHTVQSAPGQMFSTPAIPPMMYPHPAYPMPFITTILGGLYPSKSILLSGTVLPSAQRFHINLCSGNHIAFHLNPRFDENAVVRNTQIDNSWGSEERSLPRKMPFVRGQSFSVWILCEAHCLKVAVDGQHLFEYYHRLRNLPTINRLEVGGDIQLTHVQTPNKGSGTTSGTTRLLSGHTCFTLTGLLGTLVTMGLLT

SEQ ID NO: 275 - DNA, 720 bp, Artificial Sequence
  Description of Artificial Sequence: Synthetic polynucleotide
atggagcctcctggagactgggggcctcctccctggagatccacccccaaaaccgacgtcttgaggctggtgctgtatctcaccttcctgggagccccctgctacgccccagctctgccgtcctgcaaggaggacgagtacccagtgggctccgagtgctgccccaagtgcagtccaggttatcgtgtgaaggaggcctgcggggagctgacgggcacagtgtgtgaaccctgccctccaggcacctacattgcccacctcaatggcctaagcaagtgtctgcagtgccaaatgtgtgacccagccatgggcctgcgcgcgagccggaactgctccaggacagagaacgccgtgtgtggctgcagcccaggccacttctgcatcgtccaggacggggaccactgcgccgcgtgccgcgcttacgccacctccagcccgggccagagggtgcagaagggaggcaccgagagtcaggacaccctgtgtcagaactgccccccggggaccttctctcccaatgggaccctggaggaatgtcagcaccagaccaagtgcagctggctggtgacgaaggccggagctgggaccagcagctcccactgggtaccaaataaaggaagtggaaccacttcaggtactacccgtcttctatctgggcacacgtgtttcacgttgacaggtttgcttgggacgctagtaaccatgggcttgctgacttag

SEQ ID NO: 276 - protein, 239 aa, Artificial Sequence
  Description of Artificial Sequence: Synthetic polypeptide
MEPPGDWGPPPWRSTPKTDVLRLVLYLTFLGAPCYAPALPSCKEDEYPVGSECCPKCSPGYRVKEACGELTGTVCEPCPPGTYIAHLNGLSKCLQCQMCDPAMGLRASRNCSRTENAVCGCSPGHFCIVQDGDHCAACRAYATSSPGQRVQKGGTESQDTLCQNCPPGTFSPNGTLEECQHQTKCSWLVTKAGAGTSSSHWVPNKGSGTTSGTTRLLSGHTCFTLTGLLGTLVTMGLLT

SEQ ID NO: 277 - DNA, 774 bp, Artificial Sequence
  Description of Artificial Sequence: Synthetic polynucleotide
atgatcttcctcctgctaatgttgagcctggaattgcagcttcaccagatagcagctttattcacagtgacagtccctaaggaactgtacataatagagcatggcagcaatgtgaccctggaatgcaactttgacactggaagtcatgtgaaccttggagcaataacagccagtttgcaaaaggtggaaaatgatacatccccacaccgtgaaagagccactttgctggaggagcagctgcccctagggaaggcctcgttccacatacctcaagtccaagtgagggacgaaggacagtaccaatgcataatcatctatggggtcgcctgggactacaagtacctgactctgaaagtcaaagcttcctacaggaaaataaacactcacatcctaaaggttccagaaacagatgaggtagagctcacctgccaggctacaggttatcctctggcagaagtatcctggccaaacgtcagcgttcctgccaacaccagccactccaggacccctgaaggcctctaccaggtcaccagtgttctgcgcctaaagccaccccctggcagaaacttcagctgtgtgttctggaatactcacgtgagggaacttactttggccagcattgaccttcaaagtcagatggaacccaggacccatccaactccaaataaaggaagtggaaccacttcaggtactacccgtcttctatctgggcacacgtgtttcacgttgacaggtttgcttgggacgctagtaaccatgggcttgctgacttag

SEQ ID NO: 278 - protein, 257 aa, Artificial Sequence
  Description of Artificial Sequence: Synthetic polypeptide
MIFLLLMLSLELQLHQIAALFTVTVPKELYIIEHGSNVTLECNFDTGSHVNLGAITASLQKVENDTSPHRERATLLEEQLPLGKASFHIPQVQVRDEGQYQCIIIYGVAWDYKYLTLKVKASYRKINTHILKVPETDEVELTCQATGYPLAEVSWPNVSVPANTSHSRTPEGLYQVTSVLRLKPPPGRNFSCVFWNTHVRELTLASIDLQSQMEPRTHPTPNKGSGTTSGTTRLLSGHTCFTLTGLLGTLVTMGLLT

SEQ ID NO: 279 - DNA, 951 bp, Artificial Sequence
  Description of Artificial Sequence: Synthetic polynucleotide
atgatcatcttaatttacttatttctcttgctatgggaagacactcaaggatggggattcaaggatggaatttttcataactccatatggcttgaacgagcagccggtgtgtaccacagagaagcacggtctggcaaatacaagctcacctacgcagaagctaaggcggtgtgtgaatttgaaggcggccatctcgcaacttacaagcagctagaggcagccagaaaaattggatttcatgtctgtgctgctggatggatggctaagggcagagttggataccccattgtgaagccagggcccaactgtggatttggaaaaactggcattattgattatggaatccgtctcaataggagtgaaagatgggatgcctattgctacaacccacacgcaaaggagtgtggtggcgtctttacagatccaaagcaaatttttaaatctccaggcttcccaaatgagtacgaagataaccaaatctgctactggcacattagactcaagtatggtcagcgtattcacctgagttttttagattttgaccttgaagatgacccaggttgcttggctgattatgttgaaatatatgacagttacgatgatgtccatggctttgtgggaagatactgtggagatgagcttccagatgacatcatcagtacaggaaatgtcatgaccttgaagtttctaagtgatgcttcagtgacagctggaggtttccaaatcaaatatgttgcaatggatcctgtatccaaatccagtcaaggaaaaaatacaagtactacttctactggaaataaaaactttttagctggaagatttagccacttaatcgatccaaataaaggaagtggaaccacttcaggtactacccgtcttctatctgggcacacgtgtttcacgttgacaggtttgcttgggacgctagtaaccatgggcttgctgacttag

SEQ ID NO: 280 - protein, 316 aa, Artificial Sequence
  Description of Artificial Sequence: Synthetic polypeptide
MIILIYLFLLLWEDTQGWGFKDGIFHNSIWLERAAGVYHREARSGKYKLTYAEAKAVCEFEGGHLATYKQLEAARKIGFHVCAAGWMAKGRVGYPIVKPGPNCGFGKTGIIDYGIRLNRSERWDAYCYNPHAKECGGVFTDPKQIFKSPGFPNEYEDNQICYWHIRLKYGQRIHLSFLDFDLEDDPGCLADYVEIYDSYDDVHGFVGRYCGDELPDDIISTGNVMTLKFLSDASVTAGGFQIKYVAMDPVSKSSQGKNTSTTSTGNKNFLAGRFSHLIDPNKGSGTTSGTTRLLSGHTCFTLTGLLGTLVTMGLLT

SEQ ID NO: 281 - DNA, 1413 bp, Artificial Sequence
  Description of Artificial Sequence: Synthetic polynucleotide
atggagcctcctggagactgggggcctcctccctggagatccacccccaaaaccgacgtcttgaggctggtgctgtatctcaccttcctgggagccccctgctacgccccagctctgccgtcctgcaaggaggacgagtacccagtgggctccgagtgctgccccaagtgcagtccaggttatcgtgtgaaggaggcctgcggggagctgacgggcacagtgtgtgaaccctgccctccaggcacctacattgcccacctcaatggcctaagcaagtgtctgcagtgccaaatgtgtgacccagccatgggcctgcgcgcgagccggaactgctccaggacagagaacgccgtgtgtggctgcagcccaggccacttctgcatcgtccaggacggggaccactgcgccgcgtgccgcgcttacgccacctccagcccgggccagagggtgcagaagggaggcaccgagagtcaggacaccctgtgtcagaactgccccccggggaccttctctcccaatgggaccctggaggaatgtcagcaccagaccaagtgcagctggctggtgacgaaggccggagctgggaccagcagctcccactgggtaatcgatgacaaaactcacacatgcccaccgtgcccagcacctgaactcctggggggaccgtcagtcttcctcttccccccaaaacccaaggacaccctcatgatctcccggacccctgaggtcacatgcgtggtggtggacgtgagccacgaagaccctgaggtcaagttcaactggtacgtggacggcgtggaggtgcataatgccaagacaaagccgcgggaggagcagtacaacagcacgtaccgtgtggtcagcgtcctcaccgtcctgcaccaggactggctgaatggcaaggagtacaagtgcaaggtctccaacaaagccctcccagcccccatcgagaaaaccatctccaaagccaaagggcagccccgagaaccacaggtgtacaccctgcccccatcccgggaggagatgaccaagaaccaggtcagcctgacctgcctggtcaaaggcttctatcccagcgacatcgccgtggagtgggagagcaatgggcagccggagaacaactacaagaccacgcctcccgtgctggactccgacggctccttcttcctctacagcaagctcaccgtggacaagagcaggtggcagcaggggaacgtcttctcatgctccgtgatgcacgaggctctgcacaaccactacacgcagaagagcctctccctgtctccgggtaaaatcgatccaaataaaggaagtggaaccacttcaggtactacccgtcttctatctgggcacacgtgtttcacgttgacaggtttgcttgggacgctagtaaccatgggcttgctgacttag

SEQ ID NO: 282 - protein, 470 aa, Artificial Sequence
  Description of Artificial Sequence: Synthetic polypeptide
MEPPGDWGPPPWRSTPKTDVLRLVLYLTFLGAPCYAPALPSCKEDEYPVGSECCPKCSPGYRVKEACGELTGTVCEPCPPGTYIAHLNGLSKCLQCQMCDPAMGLRASRNCSRTENAVCGCSPGHFCIVQDGDHCAACRAYATSSPGQRVQKGGTESQDTLCQNCPPGTFSPNGTLEECQHQTKCSWLVTKAGAGTSSSHWVIDDKTHTCPPCPAPELLGGPSVFLFPPKPKDTLMISRTPEVTCVVVDVSHEDPEVKFNWYVDGVEVHNAKTKPREEQYNSTYRVVSVLTVLHQDWLNGKEYKCKVSNKALPAPIEKTISKAKGQPREPQVYTLPPSREEMTKNQVSLTCLVKGFYPSDIAVEWESNGQPENNYKTTPPVLDSDGSFFLYSKLTVDKSRWQQGNVFSCSVMHEALHNHYTQKSLSLSPGKIDPNKGSGTTSGTTRLLSGHTCFTLTGLLGTLVTMGLLT

SEQ ID NO: 283 - DNA, 1611 bp, Artificial Sequence
  Description of Artificial Sequence: Synthetic polynucleotide
atgaggatatttgctgtctttatattcatgacctactggcatttgctgaacgcatttactgtcacggttcccaaggacctatatgtggtagagtatggtagcaatatgacaattgaatgcaaattcccagtagaaaaacaattagacctggctgcactaattgtctattgggaaatggaggataagaacattattcaatttgtgcatggagaggaagacctgaaggttcagcatagtagctacagacagagggcccggctgttgaaggaccagctctccctgggaaatgctgcacttcagatcacagatgtgaaattgcaggatgcaggggtgtaccgctgcatgatcagctatggtggtgccgactacaagcgaattactgtgaaagtcaatgccccatacaacaaaatcaaccaaagaattttggttgtggatccagtcacctctgaacatgaactgacatgtcaggctgagggctaccccaaggccgaagtcatctggacaagcagtgaccatcaagtcctgagtggtaagaccaccaccaccaattccaagagagaggagaagcttttcaatgtgaccagcacactgagaatcaacacaacaactaatgagattttctactgcacttttaggagattagatcctgaggaaaaccatacagctgaattggtcatcccagaactacctctggcacatcctccaaatgaaaggccaaataaaggaagtggaaccacttcaggtactacccgtcttctatctgggcacacgtgtttcacgttgacaggtttgcttgggacgctagtaaccatgggcttgctgactggaagcggagctactaacttcagcctgctgaagcaggctggcgacgtggaggagaaccctggacctatggagcctcctggagactgggggcctcctccctggagatccacccccaaaaccgacgtcttgaggctggtgctgtatctcaccttcctgggagccccctgctacgccccagctctgccgtcctgcaaggaggacgagtacccagtgggctccgagtgctgccccaagtgcagtccaggttatcgtgtgaaggaggcctgcggggagctgacgggcacagtgtgtgaaccctgccctccaggcacctacattgcccacctcaatggcctaagcaagtgtctgcagtgccaaatgtgtgacccagccatgggcctgcgcgcgagccggaactgctccaggacagagaacgccgtgtgtggctgcagcccaggccacttctgcatcgtccaggacggggaccactgcgccgcgtgccgcgcttacgccacctccagcccgggccagagggtgcagaagggaggcaccgagagtcaggacaccctgtgtcagaactgccccccggggaccttctctcccaatgggaccctggaggaatgtcagcaccagaccaagtgcagctggctggtgacgaaggccggagctgggaccagcagctcccactgggtaccaaataaaggaagtggaaccacttcaggtactacccgtcttctatctgggcacacgtgtttcacgttgacaggtttgcttgggacgctagtaaccatgggcttgctgacttag

SEQ ID NO: 284 - protein, 536 aa, Artificial Sequence
  Description of Artificial Sequence: Synthetic polypeptide
MRIFAVFIFMTYWHLLNAFTVTVPKDLYVVEYGSNMTIECKFPVEKQLDLAALIVYWEMEDKNIIQFVHGEEDLKVQHSSYRQRARLLKDQLSLGNAALQITDVKLQDAGVYRCMISYGGADYKRITVKVNAPYNKINQRILVVDPVTSEHELTCQAEGYPKAEVIWTSSDHQVLSGKTTTTNSKREEKLFNVTSTLRINTTTNEIFYCTFRRLDPEENHTAELVIPELPLAHPPNERPNKGSGTTSGTTRLLSGHTCFTLTGLLGTLVTMGLLTGSGATNFSLLKQAGDVEENPGPMEPPGDWGPPPWRSTPKTDVLRLVLYLTFLGAPCYAPALPSCKEDEYPVGSECCPKCSPGYRVKEACGELTGTVCEPCPPGTYIAHLNGLSKCLQCQMCDPAMGLRASRNCSRTENAVCGCSPGHFCIVQDGDHCAACRAYATSSPGQRVQKGGTESQDTLCQNCPPGTFSPNGTLEECQHQTKCSWLVTKAGAGTSSSHWVPNKGSGTTSGTTRLLSGHTCFTLTGLLGTLVTMGLLT

SEQ ID NO: 285 - DNA, 1289 bp, Artificial Sequence
  Description of Artificial Sequence: Synthetic polynucleotide
atggcttgtcttggactccggaggtacaaagctcaactgcagctgccttctaggacttggccttttgtagccctgctcactcttcttttcatcccagtcttctctgaagccatacaggtgacccaaccttcagtggtgttggctagcagccatggtgtcgccagctttccatgtgaatattcaccatcacacaacactgatgaggtccgggtgactgtgctgcggcagacaaatgaccaaatgactgaggtctgtgccacgacattcacagagaagaatacagtgggcttcctagattaccccttctgcagtggtacctttaatgaaagcagagtgaacctcaccatccaaggactgagagctgttgacacgggactgtacctctgcaaggtggaactcatgtacccaccgccatactttgtgggcatgggcaacgggacgcagatttatgtcattgatccagaaccatgcccggattctgaatcgatgacaaaactcacacatgcccaccgtgcccagcacctgaactcctggggggaccgtcagtcttcctcttccccccaaaacccaaggacaccctcatgatctcccggacccctgaggtcacatgcgtggtggtggacgtgagccacgaagaccctgaggtcaagttcaactggtacgtggacggcgtggaggtgcataatgccaagacaaagccgcgggaggagcagtacaacagcacgtaccgtgtggtcagcgtcctcaccgtcctgcaccaggactggctgaatggcaaggagtacaagtgcaaggtctccaacaaagccctcccagcccccatcgagaaaaccatctccaaagccaaagggcagccccgagaaccacaggtgtacaccctgcccccatcccgggaggagatgaccaagaaccaggtcagcctgacctgcctggtcaaaggcttctatcccagcgacatcgccgtggagtgggagagcaatgggcagccggagaacaactacaagaccacgcctcccgtgctggactccgacggctccttcttcctctacagcaagctcaccgtggacaagagcaggtggcagcaggggaacgtcttctcatgctccgtgatgcacgaggctctgcacaaccactacacgcagaagagcctctccctgtctccgggtaaaatcgatccaaataaaggaagtggaaccacttcaggtactacccgtcttctatctgggcacacgtgtttcacgttgacaggtttgcttgggacgctagtaaccatgggcttgctgacttag

SEQ ID NO: 286 - protein, 429 aa, Artificial Sequence
  Description of Artificial Sequence: Synthetic polypeptide
MACLGLRRYKAQLQLPSRTWPFVALLTLLFIPVFSEAIQVTQPSVVLASSHGVASFPCEYSPSHNTDEVRVTVLRQTNDQMTEVCATTFTEKNTVGFLDYPFCSGTFNESRVNLTIQGLRAVDTGLYLCKVELMYPPPYFVGMGNGTQIYVIDPEPCPDSDIDDKTHTCPPCPAPELLGGPSVFLFPPKPKDTLMISRTPEVTCVVVDVSHEDPEVKFNWYVDGVEVHNAKTKPREEQYNSTYRVVSVLTVLHQDWLNGKEYKCKVSNKALPAPIEKTISKAKGQPREPQVYTLPPSREEMTKNQVSLTCLVKGFYPSDIAVEWESNGQPENNYKTTPPVLDSDGSFFLYSKLTVDKSRWQQGNVFSCSVMHEALHNHYTQKSLSLSPGKIDPNKGSGTTSGTTRLLSGHTCFTLTGLLGTLVTMGLLT

SEQ ID NO: 287 - DNA, 1518 bp, Artificial Sequence
  Description of Artificial Sequence: Synthetic polynucleotide
atgaggatatttgctggcattatattcacagcctgctgtcacttgctacgggcgtttactatcacggctccaaaggacttgtacgtggtggagtatggcagcaacgtcacgatggagtgcagattccctgtagaacgggagctggacctgcttgcgttagtggtgtactgggaaaaggaagatgagcaagtgattcagtttgtggcaggagaggaggaccttaagcctcagcacagcaacttcagggggagagcctcgctgccaaaggaccagcttttgaagggaaatgctgcccttcagatcacagacgtcaagctgcaggacgcaggcgtttactgctgcataatcagctacggtggtgcggactacaagcgaatcacgctgaaagtcaatgccccataccgcaaaatcaaccagagaatttccgtggatccagccacttctgagcatgaactaatatgtcaggccgagggttatccagaagctgaggtaatctggacaaacagtgaccaccaacccgtgagtgggaagagaagtgtcaccacttcccggacagaggggatgcttctcaatgtgaccagcagtctgagggtcaacgccacagcgaatgatgttttctactgtacgttttggagatcacagccagggcaaaaccacacagcggagctgatcatcccagaactgcctgcaacacatcctccacagaacaggactatcgatgtcgagccactgggcatggagaatgggaacattgccaactcacagatcgccgcctcatctgtgcgtgtgaccttcttgggtttgcagcattgggtcccggagctggcccgcctgaaccgcgcaggcatggtcaatgcctggacacccagcagcaatgacgataacccctggatccaggtgaacctgctgcggaggatgtgggtaacaggtgtggtgacgcagggtgccagccgcttggccagtcatgagtacctgaaggccttcaaggtggcctacagccttaatggacacgaattcgatttcatccatgatgttaataaaaaacacaaggagtttgtgggtaactggaacaaaaacgcggtgcatgtcaacctgtttgagacccctgtggaggctcagtacgtgagattgtaccccacgagctgccacacggcctgcactctgcgctttgagctactgggctgtgagctgaacggatgcgccaatcccctgggcctgaagaataacagcatccctgacaagcagatcacggcctccagcagctacaagacctggggcttgcatctcttcagctggaacccctcctatgcacggctggacaagcagggcaacttcaacgcctgggttgcggggagctacggtaacgatcagtggctgcagatcttccctggcaactgggacaaccactcccacaagaagaacttgtttgagacgcccatcctggctcgctatgtgcgcatcctgcctgtagcctggcacaaccgcatcgccctgcgcctggagctgctgggctgttag

SEQ ID NO: 288 - protein, 505 aa, Artificial Sequence
  Description of Artificial Sequence: Synthetic polypeptide
MRIFAGIIFTACCHLLRAFTITAPKDLYVVEYGSNVTMECRFPVERELDLLALVVYWEKEDEQVIQFVAGEEDLKPQHSNFRGRASLPKDQLLKGNAALQITDVKLQDAGVYCCIISYGGADYKRITLKVNAPYRKINQRISVDPATSEHELICQAEGYPEAEVIWTNSDHQPVSGKRSVTTSRTEGMLLNVTSSLRVNATANDVFYCTFWRSQPGQNHTAELIIPELPATHPPQNRTIDVEPLGMENGNIANSQIAASSVRVTFLGLQHWVPELARLNRAGMVNAWTPSSNDDNPWIQVNLLRRMWVTGVVTQGASRLASHEYLKAFKVAYSLNGHEFDFIHDVNKKHKEFVGNWNKNAVHVNLFETPVEAQYVRLYPTSCHTACTLRFELLGCELNGCANPLGLKNNSIPDKQITASSSYKTWGLHLFSWNPSYARLDKQGNFNAWVAGSYGNDQWLQIFPGNWDNHSHKKNLFETPILARYVRILPVAWHNRIALRLELLGC

SEQ ID NO: 289 - DNA, 1521 bp, Artificial Sequence
  Description of Artificial Sequence: Synthetic polynucleotide
atgaggatatttgctggcattatattcacagcctgctgtcacttgctacgggcgtttactatcacggctccaaaggacttgtacgtggtggagtatggcagcaacgtcacgatggagtgcagattccctgtagaacgggagctggacctgcttgcgttagtggtgtactgggaaaaggaagatgagcaagtgattcagtttgtggcaggagaggaggaccttaagcctcagcacagcaacttcagggggagagcctcgctgccaaaggaccagcttttgaagggaaatgctgcccttcagatcacagacgtcaagctgcaggacgcaggcgtttactgctgcataatcagctacggtggtgcggactacaagcgaatcacgctgaaagtcaatgccccataccgcaaaatcaaccagagaatttccgtggatccagccacttctgagcatgaactaatatgtcaggccgagggttatccagaagctgaggtaatctggacaaacagtgaccaccaacccgtgagtgggaagagaagtgtcaccacttcccggacagaggggatgcttctcaatgtgaccagcagtctgagggtcaacgccacagcgaatgatgttttctactgtacgttttggagatcacagccagggcaaaaccacacagcggagctgatcatcccagaactgcctgcaacacatcctccacagaacaggactatcgatgacaaaactcacacatgcccaccgtgcccagcacctgaactcctggggggaccgtcagtcttcctcttccccccaaaacccaaggacaccctcatgatctcccggacccctgaggtcacatgcgtggtggtggacgtgagccacgaagaccctgaggtcaagttcaactggtacgtggacggcgtggaggtgcataatgccaagacaaagccgcgggaggagcagtacaacagcacgtaccgtgtggtcagcgtcctcaccgtcctgcaccaggactggctgaatggcaaggagtacaagtgcaaggtctccaacaaagccctcccagcccccatcgagaaaaccatctccaaagccaaagggcagccccgagaaccacaggtgtacaccctgcccccatcccgggaggagatgaccaagaaccaggtcagcctgacctgcctggtcaaaggcttctatcccagcgacatcgccgtggagtgggagagcaatgggcagccggagaacaactacaagaccacgcctcccgtgctggactccgacggctccttcttcctctacagcaagctcaccgtggacaagagcaggtggcagcaggggaacgtcttctcatgctccgtgatgcacgaggctctgcacaaccactacacgcagaagagcctctccctgtctccgggtaaaatcgatccaaataaaggaagtggaaccacttcaggtactacccgtcttctatctgggcacacgtgtttcacgttgacaggtttgcttgggacgctagtaaccatgggcttgctgacttag

SEQ ID NO: 290 - protein, 506 aa, Artificial Sequence
  Description of Artificial Sequence: Synthetic polypeptide
MRIFAGIIFTACCHLLRAFTITAPKDLYVVEYGSNVTMECRFPVERELDLLALVVYWEKEDEQVIQFVAGEEDLKPQHSNFRGRASLPKDQLLKGNAALQITDVKLQDAGVYCCIISYGGADYKRITLKVNAPYRKINQRISVDPATSEHELICQAEGYPEAEVIWTNSDHQPVSGKRSVTTSRTEGMLLNVTSSLRVNATANDVFYCTFWRSQPGQNHTAELIIPELPATHPPQNRTIDDKTHTCPPCPAPELLGGPSVFLFPPKPKDTLMISRTPEVTCVVVDVSHEDPEVKFNWYVDGVEVHNAKTKPREEQYNSTYRVVSVLTVLHQDWLNGKEYKCKVSNKALPAPIEKTISKAKGQPREPQVYTLPPSREEMTKNQVSLTCLVKGFYPSDIAVEWESNGQPENNYKTTPPVLDSDGSFFLYSKLTVDKSRWQQGNVFSCSVMHEALHNHYTQKSLSLSPGKIDPNKGSGTTSGTTRLLSGHTCFTLTGLLGTLVTMGLLT

SEQ ID NO: 291 - DNA, 828 bp, Artificial Sequence
  Description of Artificial Sequence: Synthetic polynucleotide
atgaggatatttgctggcattatattcacagcctgctgtcacttgctacgggcgtttactatcacggctccaaaggacttgtacgtggtggagtatggcagcaacgtcacgatggagtgcagattccctgtagaacgggagctggacctgcttgcgttagtggtgtactgggaaaaggaagatgagcaagtgattcagtttgtggcaggagaggaggaccttaagcctcagcacagcaacttcagggggagagcctcgctgccaaaggaccagcttttgaagggaaatgctgcccttcagatcacagacgtcaagctgcaggacgcaggcgtttactgctgcataatcagctacggtggtgcggactacaagcgaatcacgctgaaagtcaatgccccataccgcaaaatcaaccagagaatttccgtggatccagccacttctgagcatgaactaatatgtcaggccgagggttatccagaagctgaggtaatctggacaaacagtgaccaccaacccgtgagtgggaagagaagtgtcaccacttcccggacagaggggatgcttctcaatgtgaccagcagtctgagggtcaacgccacagcgaatgatgttttctactgtacgttttggagatcacagccagggcaaaaccacacagcggagctgatcatcccagaactgcctgcaacacatcctccacagaacaggactccaaataaaggaagtggaaccacttcaggtactacccgtcttctatctgggcacacgtgtttcacgttgacaggtttgcttgggacgctagtaaccatgggcttgctgacttag

SEQ ID NO: 292 - protein, 275 aa, Artificial Sequence
  Description of Artificial Sequence: Synthetic polypeptide
MRIFAGIIFTACCHLLRAFTITAPKDLYVVEYGSNVTMECRFPVERELDLLALVVYWEKEDEQVIQFVAGEEDLKPQHSNFRGRASLPKDQLLKGNAALQITDVKLQDAGVYCCIISYGGADYKRITLKVNAPYRKINQRISVDPATSEHELICQAEGYPEAEVIWTNSDHQPVSGKRSVTTSRTEGMLLNVTSSLRVNATANDVFYCTFWRSQPGQNHTAELIIPELPATHPPQNRTPNKGSGTTSGTTRLLSGHTCFTLTGLLGTLVTMGLLT

SEQ ID NO: 293 - DNA, 1464 bp, Artificial Sequence
  Description of Artificial Sequence: Synthetic polynucleotide
atgctgctcctgctgccgatactgaacctgagcttacaacttcatcctgtagcagctttattcaccgtgacagcccctaaagaagtgtacaccgtagacgtcggcagcagtgtgagcctggagtgcgattttgaccgcagagaatgcactgaactggaagggataagagccagtttgcagaaggtagaaaatgatacgtctctgcaaagtgaaagagccaccctgctggaggagcagctgcccctgggaaaggctttgttccacatccctagtgtccaagtgagagattccgggcagtaccgttgcctggtcatctgcggggccgcctgggactacaagtacctgacggtgaaagtcaaagcttcttacatgaggatagacactaggatcctggaggttccaggtacaggggaggtgcagcttacctgccaggctagaggttatcccctagcagaagtgtcctggcaaaatgtcagtgttcctgccaacaccagccacatcaggacccccgaaggcctctaccaggtcaccagtgttctgcgcctcaagcctcagcctagcagaaacttcagctgcatgttctggaatgctcacatgaaggagctgacttcagccatcattgaccctctgagtcggatggaacccaaagtccccagaacgatcgatgtcgagccactgggcatggagaatgggaacattgccaactcacagatcgccgcctcatctgtgcgtgtgaccttcttgggtttgcagcattgggtcccggagctggcccgcctgaaccgcgcaggcatggtcaatgcctggacacccagcagcaatgacgataacccctggatccaggtgaacctgctgcggaggatgtgggtaacaggtgtggtgacgcagggtgccagccgcttggccagtcatgagtacctgaaggccttcaaggtggcctacagccttaatggacacgaattcgatttcatccatgatgttaataaaaaacacaaggagtttgtgggtaactggaacaaaaacgcggtgcatgtcaacctgtttgagacccctgtggaggctcagtacgtgagattgtaccccacgagctgccacacggcctgcactctgcgctttgagctactgggctgtgagctgaacggatgcgccaatcccctgggcctgaagaataacagcatccctgacaagcagatcacggcctccagcagctacaagacctggggcttgcatctcttcagctggaacccctcctatgcacggctggacaagcagggcaacttcaacgcctgggttgcggggagctacggtaacgatcagtggctgcagatcttccctggcaactgggacaaccactcccacaagaagaacttgtttgagacgcccatcctggctcgctatgtgcgcatcctgcctgtagcctggcacaaccgcatcgccctgcgcctggagctgctgggctgttag

SEQ ID NO: 294 - protein, 487 aa, Artificial Sequence
  Description of Artificial Sequence: Synthetic polypeptide
MLLLLPILNLSLQLHPVAALFTVTAPKEVYTVDVGSSVSLECDFDRRECTELEGIRASLQKVENDTSLQSERATLLEEQLPLGKALFHIPSVQVRDSGQYRCLVICGAAWDYKYLTVKVKASYMRIDTRILEVPGTGEVQLTCQARGYPLAEVSWQNVSVPANTSHIRTPEGLYQVTSVLRLKPQPSRNFSCMFWNAHMKELTSAIIDPLSRMEPKVPRTIDVEPLGMENGNIANSQIAASSVRVTFLGLQHWVPELARLNRAGMVNAWTPSSNDDNPWIQVNLLRRMWVTGVVTQGASRLASHEYLKAFKVAYSLNGHEFDFIHDVNKKHKEFVGNWNKNAVHVNLFETPVEAQYVRLYPTSCHTACTLRFELLGCELNGCANPLGLKNNSIPDKQITASSSYKTWGLHLFSWNPSYARLDKQGNFNAWVAGSYGNDQWLQIFPGNWDNHSHKKNLFETPILARYVRILPVAWHNRIALRLELLGC

SEQ ID NO: 295 - DNA, 1467 bp, Artificial Sequence
  Description of Artificial Sequence: Synthetic polynucleotide
atgctgctcctgctgccgatactgaacctgagcttacaacttcatcctgtagcagctttattcaccgtgacagcccctaaagaagtgtacaccgtagacgtcggcagcagtgtgagcctggagtgcgattttgaccgcagagaatgcactgaactggaagggataagagccagtttgcagaaggtagaaaatgatacgtctctgcaaagtgaaagagccaccctgctggaggagcagctgcccctgggaaaggctttgttccacatccctagtgtccaagtgagagattccgggcagtaccgttgcctggtcatctgcggggccgcctgggactacaagtacctgacggtgaaagtcaaagcttcttacatgaggatagacactaggatcctggaggttccaggtacaggggaggtgcagcttacctgccaggctagaggttatcccctagcagaagtgtcctggcaaaatgtcagtgttcctgccaacaccagccacatcaggacccccgaaggcctctaccaggtcaccagtgttctgcgcctcaagcctcagcctagcagaaacttcagctgcatgttctggaatgctcacatgaaggagctgacttcagccatcattgaccctctgagtcggatggaacccaaagtccccagaacgatcgatgacaaaactcacacatgcccaccgtgcccagcacctgaactcctggggggaccgtcagtcttcctcttccccccaaaacccaaggacaccctcatgatctcccggacccctgaggtcacatgcgtggtggtggacgtgagccacgaagaccctgaggtcaagttcaactggtacgtggacggcgtggaggtgcataatgccaagacaaagccgcgggaggagcagtacaacagcacgtaccgtgtggtcagcgtcctcaccgtcctgcaccaggactggctgaatggcaaggagtacaagtgcaaggtctccaacaaagccctcccagcccccatcgagaaaaccatctccaaagccaaagggcagccccgagaaccacaggtgtacaccctgcccccatcccgggaggagatgaccaagaaccaggtcagcctgacctgcctggtcaaaggcttctatcccagcgacatcgccgtggagtgggagagcaatgggcagccggagaacaactacaagaccacgcctcccgtgctggactccgacggctccttcttcctctacagcaagctcaccgtggacaagagcaggtggcagcaggggaacgtcttctcatgctccgtgatgcacgaggctctgcacaaccactacacgcagaagagcctctccctgtctccgggtaaaatcgatccaaataaaggaagtggaaccacttcaggtactacccgtcttctatctgggcacacgtgtttcacgttgacaggtttgcttgggacgctagtaaccatgggcttgctgacttag

SEQ ID NO: 296 - protein, 488 aa, Artificial Sequence
  Description of Artificial Sequence: Synthetic polypeptide
MLLLLPILNLSLQLHPVAALFTVTAPKEVYTVDVGSSVSLECDFDRRECTELEGIRASLQKVENDTSLQSERATLLEEQLPLGKALFHIPSVQVRDSGQYRCLVICGAAWDYKYLTVKVKASYMRIDTRILEVPGTGEVQLTCQARGYPLAEVSWQNVSVPANTSHIRTPEGLYQVTSVLRLKPQPSRNFSCMFWNAHMKELTSAIIDPLSRMEPKVPRTIDDKTHTCPPCPAPELLGGPSVFLFPPKPKDTLMISRTPEVTCVVVDVSHEDPEVKFNWYVDGVEVHNAKTKPREEQYNSTYRVVSVLTVLHQDWLNGKEYKCKVSNKALPAPIEKTISKAKGQPREPQVYTLPPSREEMTKNQVSLTCLVKGFYPSDIAVEWESNGQPENNYKTTPPVLDSDGSFFLYSKLTVDKSRWQQGNVFSCSVMHEALHNHYTQKSLSLSPGKIDPNKGSGTTSGTTRLLSGHTCFTLTGLLGTLVTMGLLT

SEQ ID NO: 297 - DNA, 1494 bp, Artificial Sequence
  Description of Artificial Sequence: Synthetic polynucleotide
atgaggatatttgctggcattatattcacagcctgctgtcacttgctacgggcgtttactatcacggctccaaaggacttgtacgtggtggagtatggcagcaacgtcacgatggagtgcagattccctgtagaacgggagctggacctgcttgcgttagtggtgtactgggaaaaggaagatgagcaagtgattcagtttgtggcaggagaggaggaccttaagcctcagcacagcaacttcagggggagagcctcgctgccaaaggaccagcttttgaagggaaatgctgcccttcagatcacagacgtcaagctgcaggacgcaggcgtttactgctgcataatcagctacggtggtgcggactacaagcgaatcacgctgaaagtcaatgccccataccgcaaaatcaaccagagaatttccgtggatccagccacttctgagcatgaactaatatgtcaggccgagggttatccagaagctgaggtaatctggacaaacagtgaccaccaacccgtgagtgggaagagaagtgtcaccacttcccggacagaggggatgcttctcaatgtgaccagcagtctgagggtcaacgccacagcgaatgatgttttctactgtacgttttggagatcacagccagggcaaaaccacacagcggagctgatcatcccagaactgcctgcaacacatcctccacagaacaggactggttgtaagccttgcatatgtacagtcccagaagtatcatctgtcttcatcttccccccaaagcccaaggatgtgctcaccattactctgactcctaaggtcacgtgtgttgtggtagacatcagcaaggatgatcccgaggtccagttcagctggtttgtagatgatgtggaggtgcacacagctcagacgcaaccccgggaggagcagttcaacagcactttccgctcagtcagtgaacttcccatcatgcaccaggactggctcaatggcaaggagttcaaatgcagggtcaacagtgcagctttccctgcccccatcgagaaaaccatctccaaaaccaaaggcagaccgaaggctccacaggtgtacaccattccacctcccaaggagcagatggccaaggataaagtcagtctgacctgcatgataacagacttcttccctgaagacattactgtggagtggcagtggaatgggcagccagcggagaactacaagaacactcagcccatcatggacacagatggctcttacttcgtctacagcaagctcaatgtgcagaagagcaactgggaggcaggaaatactttcacctgctctgtgttacatgagggcctgcacaaccaccatactgagaagagcctctcccactctcctggtaaaccaaataaaggaagtggaaccacttcaggtactacccgtcttctatctgggcacacgtgtttcacgttgacaggtttgcttgggacgctagtaaccatgggcttgctgacttag

SEQ ID NO: 298 - protein, 497 aa, Artificial Sequence
  Description of Artificial Sequence: Synthetic polypeptide
MRIFAGIIFTACCHLLRAFTITAPKDLYVVEYGSNVTMECRFPVERELDLLALVVYWEKEDEQVIQFVAGEEDLKPQHSNFRGRASLPKDQLLKGNAALQITDVKLQDAGVYCCIISYGGADYKRITLKVNAPYRKINQRISVDPATSEHELICQAEGYPEAEVIWTNSDHQPVSGKRSVTTSRTEGMLLNVTSSLRVNATANDVFYCTFWRSQPGQNHTAELIIPELPATHPPQNRTGCKPCICTVPEVSSVFIFPPKPKDVLTITLTPKVTCVVVDISKDDPEVQFSWFVDDVEVHTAQTQPREEQFNSTFRSVSELPIMHQDWLNGKEFKCRVNSAAFPAPIEKTISKTKGRPKAPQVYTIPPPKEQMAKDKVSLTCMITDFFPEDITVEWQWNGQPAENYKNTQPIMDTDGSYFVYSKLNVQKSNWEAGNTFTCSVLHEGLHNHHTEKSLSHSPGKPNKGSGTTSGTTRLLSGHTCFTLTGLLGTLVTMGLLT

SEQ ID NO: 299 - DNA, 774 bp, Artificial Sequence
  Description of Artificial Sequence: Synthetic polynucleotide
atgctgctcctgctgccgatactgaacctgagcttacaacttcatcctgtagcagctttattcaccgtgacagcccctaaagaagtgtacaccgtagacgtcggcagcagtgtgagcctggagtgcgattttgaccgcagagaatgcactgaactggaagggataagagccagtttgcagaaggtagaaaatgatacgtctctgcaaagtgaaagagccaccctgctggaggagcagctgcccctgggaaaggctttgttccacatccctagtgtccaagtgagagattccgggcagtaccgttgcctggtcatctgcggggccgcctgggactacaagtacctgacggtgaaagtcaaagcttcttacatgaggatagacactaggatcctggaggttccaggtacaggggaggtgcagcttacctgccaggctagaggttatcccctagcagaagtgtcctggcaaaatgtcagtgttcctgccaacaccagccacatcaggacccccgaaggcctctaccaggtcaccagtgttctgcgcctcaagcctcagcctagcagaaacttcagctgcatgttctggaatgctcacatgaaggagctgacttcagccatcattgaccctctgagtcggatggaacccaaagtccccagaacgccaaataaaggaagtggaaccacttcaggtactacccgtcttctatctgggcacacgtgtttcacgttgacaggtttgcttgggacgctagtaaccatgggcttgctgacttag

SEQ ID NO: 300 - protein, 257 aa, Artificial Sequence
  Description of Artificial Sequence: Synthetic polypeptide
MLLLLPILNLSLQLHPVAALFTVTAPKEVYTVDVGSSVSLECDFDRRECTELEGIRASLQKVENDTSLQSERATLLEEQLPLGKALFHIPSVQVRDSGQYRCLVICGAAWDYKYLTVKVKASYMRIDTRILEVPGTGEVQLTCQARGYPLAEVSWQNVSVPANTSHIRTPEGLYQVTSVLRLKPQPSRNFSCMFWNAHMKELTSAIIDPLSRMEPKVPRTPNKGSGTTSGTTRLLSGHTCFTLTGLLGTLVTMGLLT

SEQ ID NO: 301 - DNA, 1623 bp, Artificial Sequence
  Description of Artificial Sequence: Synthetic polynucleotide
atgaggatatttgctggcattatattcacagcctgctgtcacttgctacgggcgtttactatcacggctccaaaggacttgtacgtggtggagtatggcagcaacgtcacgatggagtgcagattccctgtagaacgggagctggacctgcttgcgttagtggtgtactgggaaaaggaagatgagcaagtgattcagtttgtggcaggagaggaggaccttaagcctcagcacagcaacttcagggggagagcctcgctgccaaaggaccagcttttgaagggaaatgctgcccttcagatcacagacgtcaagctgcaggacgcaggcgtttactgctgcataatcagctacggtggtgcggactacaagcgaatcacgctgaaagtcaatgccccataccgcaaaatcaaccagagaatttccgtggatccagccacttctgagcatgaactaatatgtcaggccgagggttatccagaagctgaggtaatctggacaaacagtgaccaccaacccgtgagtgggaagagaagtgtcaccacttcccggacagaggggatgcttctcaatgtgaccagcagtctgagggtcaacgccacagcgaatgatgttttctactgtacgttttggagatcacagccagggcaaaaccacacagcggagctgatcatcccagaactgcctgcaacacatcctccacagaacaggactccaaataaaggaagtggaaccacttcaggtactacccgtcttctatctgggcacacgtgtttcacgttgacaggtttgcttgggacgctagtaaccatgggcttgctgactggaagcggagctactaacttcagcctgctgaagcaggctggcgacgtggaggagaaccctggacctatggaacctctcccaggatgggggtcggcaccctggagccaggcccctacagacaacaccttcaggctggtgccttgtgtcttccttttgaacttgctgcagcgcatctctgcccagccctcatgcagacaggaggagttccttgtgggagacgagtgctgccccatgtgcaacccaggttaccatgtgaagcaggtctgcagtgagcatacaggcacagtgtgtgccccctgtcccccacagacatataccgcccatgcaaatggcctgagcaagtgtctgccctgcggagtctgtgatccagacatgggcctgctgacctggcaggagtgctccagctggaaggacactgtgtgcagatgcatcccaggctacttctgtgagaaccaggatgggagccactgttccacatgcttgcagcacaccacctgccctccagggcagagggtagagaagagagggactcacgaccaggacactgtatgtgctgactgcctaacagggaccttctcacttggagggactcaggaggaatgcctgccctggaccaactgcagtgcatttcaacaggaagtaagacgtgggaccaacagcacagacaccacctgctcctcccagccaaataaaggaagtggaaccacttcaggtactacccgtcttctatctgggcacacgtgtttcacgttgacaggtttgcttgggacgctagtaaccatgggcttgctgacttag

SEQ ID NO: 302 - protein, 540 aa, Artificial Sequence
  Description of Artificial Sequence: Synthetic polypeptide
MRIFAGIIFTACCHLLRAFTITAPKDLYVVEYGSNVTMECRFPVERELDLLALVVYWEKEDEQVIQFVAGEEDLKPQHSNFRGRASLPKDQLLKGNAALQITDVKLQDAGVYCCIISYGGADYKRITLKVNAPYRKINQRISVDPATSEHELICQAEGYPEAEVIWTNSDHQPVSGKRSVTTSRTEGMLLNVTSSLRVNATANDVFYCTFWRSQPGQNHTAELIIPELPATHPPQNRTPNKGSGTTSGTTRLLSGHTCFTLTGLLGTLVTMGLLTGSGATNFSLLKQAGDVEENPGPMEPLPGWGSAPWSQAPTDNTFRLVPCVFLLNLLQRISAQPSCRQEEFLVGDECCPMCNPGYHVKQVCSEHTGTVCAPCPPQTYTAHANGLSKCLPCGVCDPDMGLLTWQECSSWKDTVCRCIPGYFCENQDGSHCSTCLQHTTCPPGQRVEKRGTHDQDTVCADCLTGTFSLGGTQEECLPWTNCSAFQQEVRRGTNSTDTTCSSQPNKGSGTTSGTTRLLSGHTCFTLTGLLGTLVTMGLLT

SEQ ID NO: 303 - DNA, 1584 bp, Artificial Sequence
  Description of Artificial Sequence: Synthetic polynucleotide
atgaggatatttgctgtctttatattcatgacctactggcatttgctgaacgcatttactgtcacggttcccaaggacctatatgtggtagagtatggtagcaatatgacaattgaatgcaaattcccagtagaaaaacaattagacctggctgcactaattgtctattgggaaatggaggataagaacattattcaatttgtgcatggagaggaagacctgaaggttcagcatagtagctacagacagagggcccggctgttgaaggaccagctctccctgggaaatgctgcacttcagatcacagatgtgaaattgcaggatgcaggggtgtaccgctgcatgatcagctatggtggtgccgactacaagcgaattactgtgaaagtcaatgccccatacaacaaaatcaaccaaagaattttggttgtggatccagtcacctctgaacatgaactgacatgtcaggctgagggctaccccaaggccgaagtcatctggacaagcagtgaccatcaagtcctgagtggtaagaccaccaccaccaattccaagagagaggagaagcttttcaatgtgaccagcacactgagaatcaacacaacaactaatgagattttctactgcacttttaggagattagatcctgaggaaaaccatacagctgaattggtcatcccagaactacctctggcacatcctccaaatgaaaggtgtggaaatggaatggtagaacaaggtgaagaatgtgattgtggctatagtgaccagtgtaaagatgaatgctgcttcgatgcaaatcaaccagagggaagaaaatgcaaactgaaacctgggaaacagtgcagtccaagtcaaggtccttgttgtacagcacagtgtgcattcaagtcaaagtctgagaagtgtcgggatgattcagactgtgcaagggaaggaatatgtaatggcttcacagctctctgcccagcatctgaccctaaaccaaacttcacagactgtaataggcatacacaagtgtgcattaatgggcaatgtgcaggttctatctgtgagaaatatggcttagaggagtgtacgtgtgccagttctgatggcaaagatgataaagaattatgccatgtatgctgtatgaagaaaatggacccatcaacttgtgccagtacagggtctgtgcagtggagtaggcacttcagtggtcgaaccatcaccctgcaacctggatccccttgcaacgattttagaggttactgtgatgttttcatgcggtgcagattagtagatgctgatggtcctctagctaggcttaaaaaagcaatttttagtccagagctctatgaaaacattgctgaatggattgtggctcattggtgggcagtattacttatgggaattgctctgatcatgctaatggctggatttattaagatatgcagtgttcatactccaagtagtaatccaaagttgcctcctcctaaaccacttccaggcactttaaagaggaggagacctccacagcccattcagcaaccccagcgtcagcggccccgagagagttatcaaatgggacacatgagacgctaa

SEQ ID NO: 304 - protein, 527 aa, Artificial Sequence
  Description of Artificial Sequence: Synthetic polypeptide
MRIFAVFIFMTYWHLLNAFTVTVPKDLYVVEYGSNMTIECKFPVEKQLDLAALIVYWEMEDKNIIQFVHGEEDLKVQHSSYRQRARLLKDQLSLGNAALQITDVKLQDAGVYRCMISYGGADYKRITVKVNAPYNKINQRILVVDPVTSEHELTCQAEGYPKAEVIWTSSDHQVLSGKTTTTNSKREEKLFNVTSTLRINTTTNEIFYCTFRRLDPEENHTAELVIPELPLAHPPNERCGNGMVEQGEECDCGYSDQCKDECCFDANQPEGRKCKLKPGKQCSPSQGPCCTAQCAFKSKSEKCRDDSDCAREGICNGFTALCPASDPKPNFTDCNRHTQVCINGQCAGSICEKYGLEECTCASSDGKDDKELCHVCCMKKMDPSTCASTGSVQWSRHFSGRTITLQPGSPCNDFRGYCDVFMRCRLVDADGPLARLKKAIFSPELYENIAEWIVAHWWAVLLMGIALIMLMAGFIKICSVHTPSSNPKLPPPKPLPGTLKRRRPPQPIQQPQRQRPRESYQMGHMRR

SEQ ID NO: 305 - DNA, 1497 bp, Artificial Sequence
  Description of Artificial Sequence: Synthetic polynucleotide
atgaggatatttgctgtctttatattcatgacctactggcatttgctgaacgcatttactgtcacggttcccaaggacctatatgtggtagagtatggtagcaatatgacaattgaatgcaaattcccagtagaaaaacaattagacctggctgcactaattgtctattgggaaatggaggataagaacattattcaatttgtgcatggagaggaagacctgaaggttcagcatagtagctacagacagagggcccggctgttgaaggaccagctctccctgggaaatgctgcacttcagatcacagatgtgaaattgcaggatgcaggggtgtaccgctgcatgatcagctatggtggtgccgactacaagcgaattactgtgaaagtcaatgccccatacaacaaaatcaaccaaagaattttggttgtggatccagtcacctctgaacatgaactgacatgtcaggctgagggctaccccaaggccgaagtcatctggacaagcagtgaccatcaagtcctgagtggtaagaccaccaccaccaattccaagagagaggagaagcttttcaatgtgaccagcacactgagaatcaacacaacaactaatgagattttctactgcacttttaggagattagatcctgaggaaaaccatacagctgaattggtcatcccagaactacctctggcacatcctccaaatgaaagggagtccaaatatggtcccccatgcccatcatgcccagcacctgagttcctggggggaccatcagtcttcctgttccccccaaaacccaaggacactctcatgatctcccggacccctgaggtcacgtgcgtggtggtggacgtgagccaggaagaccccgaggtccagttcaactggtacgtggatggcgtggaggtgcataatgccaagacaaagccgcgggaggagcagttcaacagcacgtaccgtgtggtcagggtcctcaccgtcctgcaccaggactggctgaacggtaaggagtacaagtgcaaggtctccaacaaaggcctcccgtcctccatcgagaaaaccatctccaaagccaaagggcagccccgagagccacaggtgtacaccctgcccccatcccaggaggagatgaccaagaaccaggtcagcctgacctgcctggtcaaaggcttctaccccagcgacatcgccgtggagtgggagagcaatgggcagccggaggacaactacaagaccacgcctcccgtgctggactccgacggctccttcttcctctacagcaggctaaccgtggacaagagcaggtggcaggaggggaatgtcttctcatgctccgtgatgcatgaggctctgcacaaccactacacacagaagagcctctccctgtctccgggtaaattctacacaggagtctatattctgatcggagccggcgccctcatgatgctggtgggcttcctgggctgctgcggggctgtgcaggagtcccagtgc

SEQ ID NO: 306 - protein, 502 aa, Artificial Sequence
  Description of Artificial Sequence: Synthetic polypeptide
MRIFAVFIFMTYWHLLNAFTVTVPKDLYVVEYGSNMTIECKFPVEKQLDLAALIVYWEMEDKNIIQFVHGEEDLKVQHSSYRQRARLLKDQLSLGNAALQITDVKLQDAGVYRCMISYGGADYKRITVKVNAPYNKINQRILVVDPVTSEHELTCQAEGYPKAEVIWTSSDHQVLSGKTTTTNSKREEKLFNVTSTLRINTTTNEIFYCTFRRLDPEENHTAELVIPELPLAHPPNERESKYGPPCPSCPAPEFLGGPSVFLFPPKPKDTLMISRTPEVTCVVVDVSQEDPEVQFNWYVDGVEVHNAKTKPREEQFNSTYRVVRVLTVLHQDWLNGKEYKCKVSNKGLPSSIEKTISKAKGQPREPQVYTLPPSQEEMTKNQVSLTCLVKGFYPSDIAVEWESNGQPEDNYKTTPPVLDSDGSFFLYSRLTVDKSRWQEGNVFSCSVMHEALHNHYTQKSLSLSPGKFYTGVYILIGAGALMMLVGFLGCCGAVQESQCVIM

SEQ ID NO: 307 - DNA, 1542 bp, Artificial Sequence
  Description of Artificial Sequence: Synthetic polynucleotide
atgaggatatttgctgtctttatattcatgacctactggcatttgctgaacgcatttactgtcacggttcccaaggacctatatgtggtagagtatggtagcaatatgacaattgaatgcaaattcccagtagaaaaacaattagacctggctgcactaattgtctattgggaaatggaggataagaacattattcaatttgtgcatggagaggaagacctgaaggttcagcatagtagctacagacagagggcccggctgttgaaggaccagctctccctgggaaatgctgcacttcagatcacagatgtgaaattgcaggatgcaggggtgtaccgctgcatgatcagctatggtggtgccgactacaagcgaattactgtgaaagtcaatgccccatacaacaaaatcaaccaaagaattttggttgtggatccagtcacctctgaacatgaactgacatgtcaggctgagggctaccccaaggccgaagtcatctggacaagcagtgaccatcaagtcctgagtggtaagaccaccaccaccaattccaagagagaggagaagcttttcaatgtgaccagcacactgagaatcaacacaacaactaatgagattttctactgcacttttaggagattagatcctgaggaaaaccatacagctgaattggtcatcccagaactacctctggcacatcctccaaatgaaagggagtccaaatatggtcccccatgcccatcatgcccagcacctgagttcctggggggaccatcagtcttcctgttccccccaaaacccaaggacactctcatgatctcccggacccctgaggtcacgtgcgtggtggtggacgtgagccaggaagaccccgaggtccagttcaactggtacgtggatggcgtggaggtgcataatgccaagacaaagccgcgggaggagcagttcaacagcacgtaccgtgtggtcagggtcctcaccgtcctgcaccaggactggctgaacggtaaggagtacaagtgcaaggtctccaacaaaggcctcccgtcctccatcgagaaaaccatctccaaagccaaagggcagccccgagagccacaggtgtacaccctgcccccatcccaggaggagatgaccaagaaccaggtcagcctgacctgcctggtcaaaggcttctaccccagcgacatcgccgtggagtgggagagcaatgggcagccggaggacaactacaagaccacgcctcccgtgctggactccgacggctccttcttcctctacagcaggctaaccgtggacaagagcaggtggcaggaggggaatgtcttctcatgctccgtgatgcatgaggctctgcacaaccactacacacagaagagcctctccctgtctccgggtaaattctacacaggagtctatattctgatcggagccggcgccctcatgatgctggtgggcttcctgggctgctgcggggctgtgcaggagtcccagtgcaaaaagaagaaaaagaagaagaagacaaagtgtgtaattatgtaa

SEQ ID NO: 308 - protein, 513 aa, Artificial Sequence
  Description of Artificial Sequence: Synthetic polypeptide
MRIFAVFIFMTYWHLLNAFTVTVPKDLYVVEYGSNMTIECKFPVEKQLDLAALIVYWEMEDKNIIQFVHGEEDLKVQHSSYRQRARLLKDQLSLGNAALQITDVKLQDAGVYRCMISYGGADYKRITVKVNAPYNKINQRILVVDPVTSEHELTCQAEGYPKAEVIWTSSDHQVLSGKTTTTNSKREEKLFNVTSTLRINTTTNEIFYCTFRRLDPEENHTAELVIPELPLAHPPNERESKYGPPCPSCPAPEFLGGPSVFLFPPKPKDTLMISRTPEVTCVVVDVSQEDPEVQFNWYVDGVEVHNAKTKPREEQFNSTYRVVRVLTVLHQDWLNGKEYKCKVSNKGLPSSIEKTISKAKGQPREPQVYTLPPSQEEMTKNQVSLTCLVKGFYPSDIAVEWESNGQPEDNYKTTPPVLDSDGSFFLYSRLTVDKSRWQEGNVFSCSVMHEALHNHYTQKSLSLSPGKFYTGVYILIGAGALMMLVGFLGCCGAVQESQCKKKKKKKKTKCVIM

SEQ ID NO: 309 - DNA, 1515 bp, Artificial Sequence
  Description of Artificial Sequence: Synthetic polynucleotide
atgaggatatttgctgtctttatattcatgacctactggcatttgctgaacgcatttactgtcacggttcccaaggacctatatgtggtagagtatggtagcaatatgacaattgaatgcaaattcccagtagaaaaacaattagacctggctgcactaattgtctattgggaaatggaggataagaacattattcaatttgtgcatggagaggaagacctgaaggttcagcatagtagctacagacagagggcccggctgttgaaggaccagctctccctgggaaatgctgcacttcagatcacagatgtgaaattgcaggatgcaggggtgtaccgctgcatgatcagctatggtggtgccgactacaagcgaattactgtgaaagtcaatgccccatacaacaaaatcaaccaaagaattttggttgtggatccagtcacctctgaacatgaactgacatgtcaggctgagggctaccccaaggccgaagtcatctggacaagcagtgaccatcaagtcctgagtggtaagaccaccaccaccaattccaagagagaggagaagcttttcaatgtgaccagcacactgagaatcaacacaacaactaatgagattttctactgcacttttaggagattagatcctgaggaaaaccatacagctgaattggtcatcccagaactacctctggcacatcctccaaatgaaaggatcgatgacaaaactcacacatgcccaccgtgcccagcacctgaactcctggggggaccgtcagtcttcctcttccccccaaaacccaaggacaccctcatgatctcccggacccctgaggtcacatgcgtggtggtggacgtgagccacgaagaccctgaggtcaagttcaactggtacgtggacggcgtggaggtgcataatgccaagacaaagccgcgggaggagcagtacaacagcacgtaccgtgtggtcagcgtcctcaccgtcctgcaccaggactggctgaatggcaaggagtacaagtgcaaggtctccaacaaagccctcccagcccccatcgagaaaaccatctccaaagccaaagggcagccccgagaaccacaggtgtacaccctgcccccatcccgggaggagatgaccaagaaccaggtcagcctgacctgcctggtcaaaggcttctatcccagcgacatcgccgtggagtgggagagcaatgggcagccggagaacaactacaagaccacgcctcccgtgctggactccgacggctccttcttcctctacagcaagctcaccgtggacaagagcaggtggcagcaggggaacgtcttctcatgctccgtgatgcacgaggctctgcacaaccactacacgcagaagagcctctccctgtctccgggtaaaatcgatttctacacaggagtctatattctgatcggagccggcgccctcatgatgctggtgggcttcctgggctgctgcggggctgtgcaggagtcccagtgcgtaattatgtaa

SEQ ID NO: 310 - protein, 504 aa, Artificial Sequence
  Description of Artificial Sequence: Synthetic polypeptide
MRIFAVFIFMTYWHLLNAFTVTVPKDLYVVEYGSNMTIECKFPVEKQLDLAALIVYWEMEDKNIIQFVHGEEDLKVQHSSYRQRARLLKDQLSLGNAALQITDVKLQDAGVYRCMISYGGADYKRITVKVNAPYNKINQRILVVDPVTSEHELTCQAEGYPKAEVIWTSSDHQVLSGKTTTTNSKREEKLFNVTSTLRINTTTNEIFYCTFRRLDPEENHTAELVIPELPLAHPPNERIDDKTHTCPPCPAPELLGGPSVFLFPPKPKDTLMISRTPEVTCVVVDVSHEDPEVKFNWYVDGVEVHNAKTKPREEQYNSTYRVVSVLTVLHQDWLNGKEYKCKVSNKALPAPIEKTISKAKGQPREPQVYTLPPSREEMTKNQVSLTCLVKGFYPSDIAVEWESNGQPENNYKTTPPVLDSDGSFFLYSKLTVDKSRWQQGNVFSCSVMHEALHNHYTQKSLSLSPGKIDFYTGVYILIGAGALMMLVGFLGCCGAVQESQCVIM

SEQ ID NO: 311 - DNA, 1548 bp, Artificial Sequence
  Description of Artificial Sequence: Synthetic polynucleotide
atgaggatatttgctgtctttatattcatgacctactggcatttgctgaacgcatttactgtcacggttcccaaggacctatatgtggtagagtatggtagcaatatgacaattgaatgcaaattcccagtagaaaaacaattagacctggctgcactaattgtctattgggaaatggaggataagaacattattcaatttgtgcatggagaggaagacctgaaggttcagcatagtagctacagacagagggcccggctgttgaaggaccagctctccctgggaaatgctgcacttcagatcacagatgtgaaattgcaggatgcaggggtgtaccgctgcatgatcagctatggtggtgccgactacaagcgaattactgtgaaagtcaatgccccatacaacaaaatcaaccaaagaattttggttgtggatccagtcacctctgaacatgaactgacatgtcaggctgagggctaccccaaggccgaagtcatctggacaagcagtgaccatcaagtcctgagtggtaagaccaccaccaccaattccaagagagaggagaagcttttcaatgtgaccagcacactgagaatcaacacaacaactaatgagattttctactgcacttttaggagattagatcctgaggaaaaccatacagctgaattggtcatcccagaactacctctggcacatcctccaaatgaaaggatcgatgacaaaactcacacatgcccaccgtgcccagcacctgaactcctggggggaccgtcagtcttcctcttccccccaaaacccaaggacaccctcatgatctcccggacccctgaggtcacatgcgtggtggtggacgtgagccacgaagaccctgaggtcaagttcaactggtacgtggacggcgtggaggtgcataatgccaagacaaagccgcgggaggagcagtacaacagcacgtaccgtgtggtcagcgtcctcaccgtcctgcaccaggactggctgaatggcaaggagtacaagtgcaaggtctccaacaaagccctcccagcccccatcgagaaaaccatctccaaagccaaagggcagccccgagaaccacaggtgtacaccctgcccccatcccgggaggagatgaccaagaaccaggtcagcctgacctgcctggtcaaaggcttctatcccagcgacatcgccgtggagtgggagagcaatgggcagccggagaacaactacaagaccacgcctcccgtgctggactccgacggctccttcttcctctacagcaagctcaccgtggacaagagcaggtggcagcaggggaacgtcttctcatgctccgtgatgcacgaggctctgcacaaccactacacgcagaagagcctctccctgtctccgggtaaaatcgatttctacacaggagtctatattctgatcggagccggcgccctcatgatgctggtgggcttcctgggctgctgcggggctgtgcaggagtcccagtgcaaaaagaagaaaaagaagaagaagacaaagtgtgtaattatgtaa

SEQ ID NO: 312 - protein, 515 aa, Artificial Sequence
  Description of Artificial Sequence: Synthetic polypeptide
MRIFAVFIFMTYWHLLNAFTVTVPKDLYVVEYGSNMTIECKFPVEKQLDLAALIVYWEMEDKNIIQFVHGEEDLKVQHSSYRQRARLLKDQLSLGNAALQITDVKLQDAGVYRCMISYGGADYKRITVKVNAPYNKINQRILVVDPVTSEHELTCQAEGYPKAEVIWTSSDHQVLSGKTTTTNSKREEKLFNVTSTLRINTTTNEIFYCTFRRLDPEENHTAELVIPELPLAHPPNERIDDKTHTCPPCPAPELLGGPSVFLFPPKPKDTLMISRTPEVTCVVVDVSHEDPEVKFNWYVDGVEVHNAKTKPREEQYNSTYRVVSVLTVLHQDWLNGKEYKCKVSNKALPAPIEKTISKAKGQPREPQVYTLPPSREEMTKNQVSLTCLVKGFYPSDIAVEWESNGQPENNYKTTPPVLDSDGSFFLYSKLTVDKSRWQQGNVFSCSVMHEALHNHYTQKSLSLSPGKIDFYTGVYILIGAGALMMLVGFLGCCGAVQESQCKKKKKKKKTKCVIM

SEQ ID NO: 313 - DNA, 1488 bp, Artificial Sequence
  Description of Artificial Sequence: Synthetic polynucleotide
atgaggatatttgctggcattatattcacagcctgctgtcacttgctacgggcgtttactatcacggctccaaaggacttgtacgtggtggagtatggcagcaacgtcacgatggagtgcagattccctgtagaacgggagctggacctgcttgcgttagtggtgtactgggaaaaggaagatgagcaagtgattcagtttgtggcaggagaggaggaccttaagcctcagcacagcaacttcagggggagagcctcgctgccaaaggaccagcttttgaagggaaatgctgcccttcagatcacagacgtcaagctgcaggacgcaggcgtttactgctgcataatcagctacggtggtgcggactacaagcgaatcacgctgaaagtcaatgccccataccgcaaaatcaaccagagaatttccgtggatccagccacttctgagcatgaactaatatgtcaggccgagggttatccagaagctgaggtaatctggacaaacagtgaccaccaacccgtgagtgggaagagaagtgtcaccacttcccggacagaggggatgcttctcaatgtgaccagcagtctgagggtcaacgccacagcgaatgatgttttctactgtacgttttggagatcacagccagggcaaaaccacacagcggagctgatcatcccagaactgcctgcaacacatcctccacagaacaggactggttgtaagccttgcatatgtacagtcccagaagtatcatctgtcttcatcttccccccaaagcccaaggatgtgctcaccattactctgactcctaaggtcacgtgtgttgtggtagacatcagcaaggatgatcccgaggtccagttcagctggtttgtagatgatgtggaggtgcacacagctcagacgcaaccccgggaggagcagttcaacagcactttccgctcagtcagtgaacttcccatcatgcaccaggactggctcaatggcaaggagttcaaatgcagggtcaacagtgcagctttccctgcccccatcgagaaaaccatctccaaaaccaaaggcagaccgaaggctccacaggtgtacaccattccacctcccaaggagcagatggccaaggataaagtcagtctgacctgcatgataacagacttcttccctgaagacattactgtggagtggcagtggaatgggcagccagcggagaactacaagaacactcagcccatcatggacacagatggctcttacttcgtctacagcaagctcaatgtgcagaagagcaactgggaggcaggaaatactttcacctgctctgtgttacatgagggcctgcacaaccaccatactgagaagagcctctcccactctcctggtaaattctacacaggagtctatattctgatcggagccggcgccctcatgatgctggtgggcttcctgggctgctgcggggctgtgcaggagtcccagtgcgtaattatgtaa

SEQ ID NO: 314 - protein, 495 aa, Artificial Sequence
  Description of Artificial Sequence: Synthetic polypeptide
MRIFAGIIFTACCHLLRAFTITAPKDLYVVEYGSNVTMECRFPVERELDLLALVVYWEKEDEQVIQFVAGEEDLKPQHSNFRGRASLPKDQLLKGNAALQITDVKLQDAGVYCCIISYGGADYKRITLKVNAPYRKINQRISVDPATSEHELICQAEGYPEAEVIWTNSDHQPVSGKRSVTTSRTEGMLLNVTSSLRVNATANDVFYCTFWRSQPGQNHTAELIIPELPATHPPQNRTGCKPCICTVPEVSSVFIFPPKPKDVLTITLTPKVTCVVVDISKDDPEVQFSWFVDDVEVHTAQTQPREEQFNSTFRSVSELPIMHQDWLNGKEFKCRVNSAAFPAPIEKTISKTKGRPKAPQVYTIPPPKEQMAKDKVSLTCMITDFFPEDITVEWQWNGQPAENYKNTQPIMDTDGSYFVYSKLNVQKSNWEAGNTFTCSVLHEGLHNHHTEKSLSHSPGKFYTGVYILIGAGALMMLVGFLGCCGAVQESQCVIM

SEQ ID NO: 315 - DNA, 1521 bp, Artificial Sequence
  Description of Artificial Sequence: Synthetic polynucleotide
atgaggatatttgctggcattatattcacagcctgctgtcacttgctacgggcgtttactatcacggctccaaaggacttgtacgtggtggagtatggcagcaacgtcacgatggagtgcagattccctgtagaacgggagctggacctgcttgcgttagtggtgtactgggaaaaggaagatgagcaagtgattcagtttgtggcaggagaggaggaccttaagcctcagcacagcaacttcagggggagagcctcgctgccaaaggaccagcttttgaagggaaatgctgcccttcagatcacagacgtcaagctgcaggacgcaggcgtttactgctgcataatcagctacggtggtgcggactacaagcgaatcacgctgaaagtcaatgccccataccgcaaaatcaaccagagaatttccgtggatccagccacttctgagcatgaactaatatgtcaggccgagggttatccagaagctgaggtaatctggacaaacagtgaccaccaacccgtgagtgggaagagaagtgtcaccacttcccggacagaggggatgcttctcaatgtgaccagcagtctgagggtcaacgccacagcgaatgatgttttctactgtacgttttggagatcacagccagggcaaaaccacacagcggagctgatcatcccagaactgcctgcaacacatcctccacagaacaggactggttgtaagccttgcatatgtacagtcccagaagtatcatctgtcttcatcttccccccaaagcccaaggatgtgctcaccattactctgactcctaaggtcacgtgtgttgtggtagacatcagcaaggatgatcccgaggtccagttcagctggtttgtagatgatgtggaggtgcacacagctcagacgcaaccccgggaggagcagttcaacagcactttccgctcagtcagtgaacttcccatcatgcaccaggactggctcaatggcaaggagttcaaatgcagggtcaacagtgcagctttccctgcccccatcgagaaaaccatctccaaaaccaaaggcagaccgaaggctccacaggtgtacaccattccacctcccaaggagcagatggccaaggataaagtcagtctgacctgcatgataacagacttcttccctgaagacattactgtggagtggcagtggaatgggcagccagcggagaactacaagaacactcagcccatcatggacacagatggctcttacttcgtctacagcaagctcaatgtgcagaagagcaactgggaggcaggaaatactttcacctgctctgtgttacatgagggcctgcacaaccaccatactgagaagagcctctcccactctcctggtaaattctacacaggagtctatattctgatcggagccggcgccctcatgatgctggtgggcttcctgggctgctgcggggctgtgcaggagtcccagtgcaaaaagaagaaaaagaagaagaagacaaagtgtgtaattatgtaa

SEQ ID NO: 316 - protein, 506 aa, Artificial Sequence
  Description of Artificial Sequence: Synthetic polypeptide
MRIFAGIIFTACCHLLRAFTITAPKDLYVVEYGSNVTMECRFPVERELDLLALVVYWEKEDEQVIQFVAGEEDLKPQHSNFRGRASLPKDQLLKGNAALQITDVKLQDAGVYCCIISYGGADYKRITLKVNAPYRKINQRISVDPATSEHELICQAEGYPEAEVIWTNSDHQPVSGKRSVTTSRTEGMLLNVTSSLRVNATANDVFYCTFWRSQPGQNHTAELIIPELPATHPPQNRTGCKPCICTVPEVSSVFIFPPKPKDVLTITLTPKVTCVVVDISKDDPEVQFSWFVDDVEVHTAQTQPREEQFNSTFRSVSELPIMHQDWLNGKEFKCRVNSAAFPAPIEKTISKTKGRPKAPQVYTIPPPKEQMAKDKVSLTCMITDFFPEDITVEWQWNGQPAENYKNTQPIMDTDGSYFVYSKLNVQKSNWEAGNTFTCSVLHEGLHNHHTEKSLSHSPGKFYTGVYILIGAGALMMLVGFLGCCGAVQESQCKKKKKKKKTKCVIM

SEQ ID NO: 317 - protein, 288 aa, Mus musculus
MWVRQVPWSFTWAVLQLSWQSGWLLEVPNGPWRSLTFYPAWLTVSEGANATFTCSLSNWSEDLMLNWNRLSPSNQTEKQAAFCNGLSQPVQDARFQIIQLPNRHDFHMNILDTRRNDSGIYLCGAISLHPKAKIEESPGAELVVTERILETSTRYPSPSPKPEGRFQGMVIGIMSALVGIPVLLLLAWALAVFCSTSMSEARGAGSKDDTLKEEPSAAPVPSVAYEELDFQGREKTPELPTACVHTEYATIVFTEGLGASAMGRRGSADGLQGPRPPRHEDGHCSWPL

SEQ ID NO: 318 - DNA, 7796 bp, Homo sapiens
ggggccggggggcggagccttgcgggctggagcgaaagaatgcgggggctgagcgcagaagcggctcgaggctggaagaggatcttgggcgccgccagtctctctctgttgcccaagctggagtgcagtggcacagtcttggctcactgcaacctccacctcctgggtgcaagcgattctcgtgtctcagcctctcaagtagctgggattacagtctttagcaccagttggtgtaggagttgagacctacttcacagtagttctgtggacaatcacaatgggaatccaaggagggtctgtcctgttcgggctgctgctcgtcctggctgtcttctgccattcaggtcatagcctgcagtgctacaactgtcctaacccaactgctgactgcaaaacagccgtcaattgttcatctgattttgatgcgtgtctcattaccaaagctgggttacaagtgtataacaagtgttggaagtttgagcattgcaatttcaacgacgtcacaacccgcttgagggaaaatgagctaacgtactactgctgcaagaaggacctgtgtaactttaacgaacagcttgaaaatggtgggacatccttatcagagaaaacagttcttctgctggtgactccatttctggcagcagcctggagccttcatccctaagtcaacaccaggagagcttctcccaaactccccgttcctgcgtagtccgctttctcttgctgccacattctaaaggcttgatattttccaaatggatcctgttgggaaagaataaaattagcttgagcaacctggctaagatagaggggctctgggagactttgaagaccagtcctgtttgcagggaagccccacttgaaggaagaagtctaagagtgaagtaggtgtgacttgaactagattgcatgcttcctcctttgctcttgggaagaccagctttgcagtgacagcttgagtgggttctctgcagccctcagattatttttcctctggctccttggatgtagtcagttagcatcattagtacatctttggagggtggggcaggagtatatgagcatcctctctcacatggaacgctttcataaacttcagggatcccgtgttgccatggaggcatgccaaatgttccatatgtgggtgtcagtcagggacaacaagatccttaatgcagagctagaggacttctggcagggaagtggggaagtgttccagatagcagggcatgaaaacttagagaggtacaagtggctgaaaatcgagtttttcctctgtctttaaattttatatgggctttgttatcttccactggaaaagtgtaatagcatacatcaatggtgtgttaaagctatttccttgccttttttttattggaatggtaggatatcttggctttgccacacacagttacagagtgaacactctactacatgtgactggcagtattaagtgtgcttattttaaatgttactggtagaaaggcagttcaggtatgtgtgtatatagtatgaatgcagtggggacaccctttgtggttacagtttgagacttccaaaggtcatccttaataacaacagatctgcaggggtatgttttaccatctgcatccagcctcctgctaactcctagctgactcagcatagattgtataaaatacctttgtaacggctcttagcacactcacagatgtttgaggctttcagaagctcttctaaaaaatgatacacacctttcacaagggcaaactttttccttttccctgtgtattctagtgaatgaatctcaagattcagtagacctaatgacatttgtattttatgatcttggctgtatttaatggcataggctgacttttgcagatggaggaatttcttgattaatgttgaaaaaaaacccttgattatactctgttggacaaaccgagtgcaatgaatgatgcttttctgaaaatgaaatataacaagtgggtgaatgtggttatggccgaaaaggatatgcagtatgcttaatggtagcaactgaaagaagacatcctgagcagtgccagctttcttctgttgatgccgttccctgaacataggaaaatagaaacttgcttatcaaaacttagcattaccttggtgctctgtgttctctgttagctcagtgtctttccttacatcaataggtttttttttttttttttggcctgaggaagtactgaccatgcccacagccaccggctgagcaaagaagctcatttcatgtgagttctaaggaatgagaaacaattttgatgaatttaagcagaaaatgaatttctgggaacttttttgggggcgggggggtggggaattcagccacactccagaaagccaggagtcgacagttttggaagcctctctcaggattgagattctaggatgagattggcttactgctatcttgtgtcatgtacccactttttggccagactacactgggaagaaggtagtcctctaaagcaaaatctgagtgccactaaatggggagatggggctgttaagctgtccaaatcaacaagggtcatataaatggccttaaactttggggttgctttctgcaaaaagttgctgtgactcatgccatagacaaggttgagtgcctggacccaaaggcaatactgtaatgtaaagacatttatagtactaggcaaacagcaccccaggtactccaggccctcctggctggagagggctgtggcaatagaaaattagtgccaactgcagtgagtcagcctaggttaaatagagagtgtaagagtgctggacaggaacctccaccctcatgtcacatttcttcaatgtgacccttctggcccctctcctcctgacagcggaacaatgactgccccgataggtgaggctggaggaagaatcagtcctgtccttggcaagctcttcactatgacagtaaaggctctctgcctgctgccaaggcctgtgactttctaacctggcctcacgctgggtaagcttaaggtagaggtgcaggattagcaagcccacctggctaccaggccgacagctacatcctccaactgaccctgatcaacgaagagggattcatgtgtctgtctcagttggttccaaatgaaaccagggagcaggggagttaggaatcgaacaccagtcatgcctactggctctctgctcgagagccaataccctgtgccctccactcatctggatttacaggaactgtcatagtgttcagtattgggtggtgataagcccattggattgtccccttggggggatgagctaggggtgcaaggaacacctgatgagtagataagtggagctcatggtatttcctgaaagatgctaatctatttgccaaacttggtcttgaatgtactgggggcttcaaggtatgggtatatttttcttgtgtccttgcagttagcccccatgtcttatgtgtgtcctgaaaaaataagagcctgcccaagactttgggcctcttgacagaattaaccacttttatacatctgagttctcttggtaagttctttagcagtgttcaaagtctactagctcgcattagtttctgttgctgccaacagatctgaactaatgctaacagatccccctgagggattcttgatgggctgagcagctggctggagctagtactgactgacattcattgtgatgagggcagctttctggtacaggattctaagctctatgttttatatacattttcatctgtacttgcacctcactttacacaagaggaaactatgcaaagttagctggatcgctcaaggtcacttaggtaagttggcaagtccatgcttcccactcagctcctcaggtcagcaagtctacttctctgcctattttgtatactctctttaatatgtgcctagctttggaaagtctagaatgggtccctggtgcctttttactttgaagaaatcagtttctgcctctttttggaaaagaaaacaaagtgcaattgttttttactggaaagttacccaatagcatgaggtgaacaggacgtagttaggccttcctgtaaacagaaaatcatatcaaaacactatcttcccatctgtttctcaatgcctgctacttcttgtagatatttcatttcaggagagcagcagttaaacccgtggattttgtagttaggaacctgggttcaaaccctcttccactaattggctatgtctctggacaagtttttttttttttttttttttaaaccctttctgaactttcactttctatgtctacctcaaagaattgttgtgaggcttgagataatgcatttgtaaagggtctgccagataggaagatgctagttatggatttacaaggttgttaaggctgtaagagtctaaaacctacagtgaatcacaatgcatttacccccactgacttggacataagtgaaaactagccagaagtctctttttcaaattacttacaggttattcaatataaaatttttgtaatggataatcttatttatctaaactaaagcttcctgtttatacacactcctgttattctgggataagataaatgaccacagtaccttaatttctaggtgggtgcctgtgatggttcattgtaggtaaggacattttctctttttcagcagctgtgtaggtccagagcctctgggagaggaggggggtagcatgcacccagcaggggactgaactgggaaactcaaggttctttttactgtggggtagtgagctgcctttctgtgatcggtttccctagggatgttgctgttcccctccttgctattcgcagctacatacaacgtggccaaccccagtaggctgatcctatatatgatcagtgctggtgctgactctcaatagccccacccaagctggctataggtttacagatacattaattaggcaacctaaaatattgatgctggtgttggtgtgacataatgctatggccagaactgaaacttagagttataattcatgtattagggttctccagagggacagaattagtaggatatatgtatatatgaaagggaggttattagggagaactggctcccacagttagaaggcgaagtcgcacaataggccgtctgcaagctgggttagagagaagccagtagtggctcagcctgagttcaaaaacctcaaaactggggaagctgacagtgcagccagccttcagtctgtggccaaaggcccaagagcccctggcaaccaacccactggtgcaagtcctagattccaaaggctgaagaacctggagtctgatgtccaagagcaggaagagtggaagaaagccagaagactcagcaaacaaggtagacagtgtctaccaccatagtggccataccaaagaggctaccgattccttcctgctacctggatccctgaagttgccctggtctctgcaccttctaaacctagttcttaagagctttccattacatgagctgtctcaaagccctccaataaattctcagtgtaagcttctgttgcttgtggacagaaaattctgacagacctaccctataagtgttactgtcaggataacatgagaacgcacaacagtaagtggtcactaagtgttagctacggttattttgcccaaggtagcatggctagttgatgccggttgatggggcttaaacccagctccctcatcttccaggcctctgtactccctattccactaaactacctctcaggtttatttttttaaattcttactctgcaagtacataggaccacatttacctgggaaaacaagaataaaggctgctctgcattttttagaaacttttttgaaagggagatgggaatgcctgcacccccaagtccagaccaacacaatggttaattgagatgaataataaaggaaagactgttctgggcttcccagaatagcttggtccttaaattgtggcacaaacaacctcctgtcagagccagcctcctgccaggaagaggggtaggagactagaggccgtgtgtgcagccttgccctgaaggctagggtgacaatttggaggctgtccaaacaccctggcctctagagctggcctgtctatttgaaatgccggctctgatgctaatcggcgaccctcaggcaagttacttaaccttacatgcctcagttttctcatctggaaaatgagaaccctaggtttagggttgttagaaaagttaaatgagttaagacaagtgcctgggacacagtagcctcttgtgtgtgtttatcattatgtcctcagcaggtcgtagaagcagcttctcaggtgtgaggctggcgcgattatctggagtgggttgggttttctaggatggaccccctgctgcattttcctcattcatccaccagggcttaatggggaatcaaggaatccatgtgtaactgtataataactgtagccacactccaatgaccacctactagttgtccctggcactgcttatacatatgtccatcaaatcaatcctatgaagtagatactgtcttcattttatagatcagagacaattggggttcagagagctgatgtgattttcccagggtcacagagagtcccagattcaggcacaactcttgtattccaagacacaaccactacatgtccaaaggctgcccagagccaccgggcacggcaaattgtgacatatccctaaagaggctgagcacctggtcaggatctgatggctgacagtgtgtccagatgcagagctggagtgggggaggggaaggggggctccttgggacagagaaggctttctgtgctttctctgaagggagcagtctgaggaccaagggaacccggcaaacagcacctcaggtactccaggccctcctggctggagagggctgtggcaatggaaaattagtgccaactgcaatgagtcagcctcggttaaatagagagtgaagaatgctggacaggaacctccaccctcatgtcacatttcttcagtgtgacccttctggcccctctcctcctgacagcggaacaatgactgccccgataggtgaggctggaggaagaatcagtcctgtccttggcaagctcttcactatgacagtaaaggctctctgcctgctgccaaggcctgtgactttctaacctggcctcacgctgggtaagcttaaggtagaggtgcaggattagcaagcccacctggctaccaggccgacagctacatctttcaactgaccctgatcaacgaagagggacttgtgtctctcagttggttccaaatgaaaccagggagcaggggcgttaggaagctccaacaggatggtacttaatggggcatttgagtggagaggtaggtgacatagtgctttggagcccagggagggaaaggttctgctgaagttgaattcaagactgttctttcatcacaaacttgagtttcctggacatttgtttgcagaaacaaccgtagggttttgccttaacctcgtgggtttattattacctcatagggactttgcctcctgacagcagtttatgggtgttcattgtggcacttgagttttcttgcatacttgttagagaaaccaagtttgtcatcaacttcttatttaaccccctggctataacttcatggattatgttataattaagccatccagagtaaaatctgtttagattatcttggagtaagggggaaaaaatctgtaattttttctcctcaactagatatatacataaaaaatgattgtattgcttcatttaaaaaatataacgcaaaatctcttttccttctaaaaaaaaaaaaaaaaaa

SEQ ID NO: 319 - protein, 4 aa, Artificial Sequence
  Description of Artificial Sequence: Synthetic peptide
GSSG

What is claimed is:

1. An engineered extracellular vesicle comprising:
at least one fusion polypeptide comprising:
(i) at least one protein of interest (POI) domain or a fragment thereof; and
(ii) at least one vesicle targeting domain,
wherein the POI domain is in an extracellular position relative to a lipid membrane of the extracellular vesicle.

2. The engineered extracellular vesicle of claim 1, wherein the extracellular vesicle is an exosome.

3. The engineered extracellular vesicle of claim 1 or claim 2, wherein the protein of interest (PO) domain or a fragment thereof is a N-terminal domain of the fusion polypeptide.

4. The engineered extracellular vesicle of any one of claims 1-3, wherein the vesicle targeting domain is a C-terminal domain of the fusion polypeptide.

5. The engineered extracellular vesicle of any one of claims 1-4, wherein the fusion polypeptide comprises at least two POI domains and/or at least two exosome targeting domains.

6. The engineered extracellular vesicle of any one of claims 1-5, wherein the fusion polypeptide further comprises a peptide linker.

7. The engineered extracellular vesicle of any one of claims 1-6, wherein the fusion polypeptide further comprises a fragment crystallizable region (Fc) domain.

8. The engineered extracellular vesicle of any one of claims 1-7, wherein the vesicle targeting domain is in a luminal position relative to the lipid membrane of the extracellular vesicle.

9. The engineered extracellular vesicle of any one of claims 1-7, wherein the vesicle targeting domain in an exterior position relative to the lipid membrane of the extracellular vesicle.

10. The engineered extracellular vesicle of any one of claims 1-9, wherein the POI domain is selected from the group consisting of: Table 1.

11. The engineered extracellular vesicle of any one of claims 1-10, wherein the POI domain is PD-L1 or a fragment thereof.

12. The engineered extracellular vesicle of any one of claims 1-11, wherein the POI domain is PD-L2 or a fragment thereof.

13. The engineered extracellular vesicle of any one of claims 1-12, wherein the POI domain is FGL1 or a fragment thereof.

14. The engineered extracellular vesicle of any one of claims 1-13, wherein the POI domain is 4-1BBL or a fragment thereof.

15. The engineered extracellular vesicle of any one of claims 1-14, wherein the POI domain is CTLA-4 or a fragment thereof.

16. The engineered extracellular vesicle of any one of claims 1-15, wherein the POI domain substantially binds to one or more of a target polypeptide.

17. The engineered extracellular vesicle of claim 16, wherein the target polypeptide is selected from the group consisting of: Table 2.

18. The engineered extracellular vesicle of any one of claims 1-17, wherein the vesicle targeting domain is selected from the group consisting of: Table 3.

19. The engineered extracellular vesicle of any one of claims 1-18, wherein the linker is in an exterior position relative to the lipid membrane of the extracellular vesicle.

20. The engineered extracellular vesicle of any one of claims 1-18, wherein the linker is a transmembrane linker.

21. The engineered extracellular vesicle of any one of claims 1-18, wherein the linker is in a luminal position relative to the lipid membrane of the extracellular vesicle.

22. The engineered extracellular vesicle of any one of claims 1-21, wherein the extracellular vesicle does not comprise an endogenous POI polypeptide.

23. A composition comprising a plurality of the engineered extracellular vesicles of any one of claims 1-22.

24. The composition of claim 23, further comprising a pharmaceutically acceptable carrier.

25. An engineered extracellular vesicle comprising:
(a) a first fusion polypeptide comprising:
(i) at least one protein of interest (POI) domain or a fragment thereof, and
(ii) at least one vesicle targeting domain,
wherein the at least one POI domain is in an extracellular position relative to a lipid membrane of the extracellular vesicle,
(b) a second fusion polypeptide comprising:
(i) at least one protein of interest (POI) domain or a fragment thereof; and
(ii) at least one vesicle targeting domain,
wherein the POI domain is in an extracellular position relative to a lipid membrane of the extracellular vesicle,
and wherein the at least one vesicle targeting domain is within a lipid membrane of the extracellular vesicle.

26. A composition comprising two or more of the engineered extracellular vesicles selected from any one of claims 1-25.

27. An extracellular vesicle composition comprising:
a plurality of artificial synapses,
wherein each artificial synapse comprises (i) an extracellular vesicle; (ii) one or more sticky binders; and (iii) one or more signaling domains.

28. The composition of claim 27, wherein the extracellular vesicle comprises an exosome.

29. The composition of claim 27, wherein the one or more sticky binders is selected from the group consisting of: a GPI anchor, a fatty acetylation site, and a prenylation site.

30. The composition of claim 27, wherein the signaling domain comprises one or more of: PD-L1, PD-L2, CTLA-4 (CD152), 4-1BBL (CD137L), HVEM (CD270), FGL1, OX-2 (CD200), Galectin-9, PVR (CD155), Nectin-2 (CD112) isoform alpha, Nectin-2 (CD112) isoform beta, Nectin-2 (CD112) isoform delta, IL-10, TSG-6, B7-H3 (CD276), B7-H4 (VTCN1), B7-H5 (VISTA), B7-H7 (HHLA2), BTNL1, VSIG8, VSIG3 (IGSF11), VSIG4, TIM-3 (HAVCR2), TIM-4 (TIMD4), CEACAM1, BTN3A1, BTN3A2, BTN2A1, BTNL8, BTN2A2, BTN1A1, TIGIT, CD27L (CD70), CD30L (CD153), GITRL, CD40L (CD154), LIGHT (CD258), TL1, CD80, CD86, LFA-3 (CD58), SLAM (CD150), CD40, CD28, CD28H, CD2, LFA-3 (CD58), CD48, CD226, DR3, DcR3, FasL, TIM-1 (CD365), PD-1, or active fragment thereof.

31. A method of producing the engineered extracellular vesicle or the composition of any one of claims 1-30, comprising:
(a) providing a population of cells expressing a vector construct encoding one or more sticky binder and one or more signaling domains; and
(b) isolating a plurality of artificial synapses from the population of cells.

32. A method of producing the engineered extracellular vesicle or the composition of any one of claims 1-30, comprising:
(a) providing a population of cells expressing a vector construct encoding one or more sticky binder and one or more signaling domains; and
(b) isolating a plurality of artificial synapses from the population of cells; and
(c) purifying the plurality of artificial synapses from the population of cells.

33. The method of claim 31 or claim 32, the isolating is via size exclusion chromatography.

34. The method of claim 32, wherein the purifying is via multimodal chromatography.

35. The method of any of claims 31-34, further comprising performing an assay for POI binding to a target polypeptide.

36. The method of claim 35, wherein the vector construct further encodes a promoter.

37. The method of claim 36, wherein the promoter is a tissue-specific promoter or an inducible promotor.

38. A method of modulating inflammation in a subject, the method comprising:
administering a composition comprising a plurality of engineered extracellular vesicles to a subject in need thereof,
wherein the engineered extracellular vesicles comprise at least one fusion polypeptide comprising:
(i) at least one protein of interest (POI) domain or a fragment thereof; and
(ii) at least one vesicle targeting domain.

39. The method of claim 38, wherein the extracellular vesicle comprises an exosome.

40. The method of any one of claims 38-39, further comprising selecting a subject that has or is suspected of having an autoimmune disease or an inflammatory disease or condition.

41. The method of any one of claims 38-40, wherein the vesicle targeting domain is selected from the group consisting of: a Glycosylphosphatidylinositol (GPI) anchor, a fatty acetylation site, and a prenylation site.

42. The method of any one of claims 38-41, wherein the vesicle targeting domain is a GPI anchor.

43. The method of any one of claims 38-41, wherein the vesicle targeting domain is C1C2.

44. The method of any one of claims 38-43, wherein the protein of interest (POI) domain comprises one or more of: PD-L1, PD-L2, CTLA-4 (CD152), 4-1BBL (CD137L), HVEM (CD270), FGL1, OX-2 (CD200), Galectin-9, PVR (CD155), Nectin-2 (CD112) isoform alpha, Nectin-2 (CD112) isoform beta, Nectin-2 (CD112) isoform delta, IL-10, TSG-6, B7-H3 (CD276), B7-H4 (VTCN1), B7-H5 (VISTA), B7-H7 (HHLA2), BTNL1, VSIG8, VSIG3 (IGSF11), VSIG4, TIM-3 (HAVCR2), TIM-4 (TIMD4), CEACAM1, BTN3A1, BTN3A2, BTN2A1, BTNL8, BTN2A2, BTN1A1, TIGIT, CD27L (CD70), CD30L (CD153), GITRL, CD40L (CD154), LIGHT (CD258), TL1, CD80, CD86, LFA-3 (CD58), SLAM (CD150), CD40, CD28, CD28H, CD2, LFA-3 (CD58), CD48, CD226, DR3, DcR3, FasL, TIM-1 (CD365), PD-1, or active fragment thereof.

45. The method of any one of claims 38-44, wherein the protein of interest (POI) domain is PD-L1 or a fragment thereof.

46. The method of any one of claims 38-44, wherein the protein of interest (POI) domain is PD-L2 or a fragment thereof.

47. The method of any one of claims 38-44, wherein the protein of interest (POI) domain is CTLA-4 or a fragment thereof.

48. The method of any one of claims 38-44, wherein the protein of interest (POI) domain is HVEM or a fragment thereof.

49. The method of claim 40, wherein the inflammatory disease and/or condition is acute.

50. The method of claim 40, wherein the inflammatory related disease and/or condition is chronic.

51. The method of claim 38, wherein administering the composition comprises injection, topical administration, or inhalation.

52. Use of a composition comprising a plurality of engineered extracellular vesicles, the engineered extracellular vesicles each comprising:
at least one fusion polypeptide comprising:
(i) at least one protein of interest (POI) domain or a fragment thereof; and
(ii) at least one vesicle targeting domain
for the treatment of an inflammatory disease or condition.

53. Use of a composition comprising a plurality of engineered extracellular vesicles, the engineered extracellular vesicles each comprising:
at least one fusion polypeptide comprising:
(i) at least one protein of interest (POI) domain or a fragment thereof, and
(ii) at least one vesicle targeting domain
for the treatment of an autoimmune disease or condition.

54. Use of a composition comprising a plurality of engineered extracellular vesicles, the engineered extracellular vesicles each comprising:
at least one fusion polypeptide comprising:
(i) at least one protein of interest (POI) domain or a fragment thereof; and
(ii) at least one vesicle targeting domain
for the treatment of cancer.
